(19) United States
(12) Patent Application Publication
(10) Pub. No.: US 2009/0317810 A1
(43) Pub. Date: Dec. 24, 2009

(54) METHODS AND NUCLEIC ACIDS FOR THE DETECTION OF COLORECTAL CELL PROLIFERATIVE DISORDERS

(75) Inventors: Catherine Lofton-Day, Seattle, WA (US); Matthias Ebert, Muenchen (DE)

Correspondence Address: DAVIS WRIGHT TREMAINE, LLP/Seattle, 1201 Third Avenue, Suite 2200, SEATTLE, WA, 98101-3045, US

(73) Assignee: Epigenomics AG, Berlin (DE)

(21) Appl. No.: 12/297,303

(22) PCT Filed: Apr. 17, 2007
(86) PCT No.: PCT/EP2007/003380

§ 371 Date: Apr. 22, 2009

Related U.S. Application Data
(63) Continuation-in-part of application No. PCT/US06/14131, filed on Apr. 17, 2006.

(30) Foreign Application Priority Data
Jun. 27, 2006 (EP) 06090119.6

(51) Int. Cl. C12Q 1/68; G01N 33/53; C12Q 1/02; C07H 21/04

(52) U.S. Cl. 435/6; 435/7.1; 435/29; 536/23.1

(57) ABSTRACT

The invention provides methods, nucleic acids and kits for detecting, or for distinguishing between or among colorectal cell proliferative disorders. The invention discloses genomic sequences the methylation patterns of which have utility for the improved detection of and differentiation between said class of disorders, thereby enabling the improved diagnosis and treatment of patients.

### FIELD OF THE INVENTION

[0001] The present invention relates to genomic DNA sequences that exhibit altered expression patterns in disease states relative to normal. Particular embodiments provide, inter alia, novel methods, nucleic acids, nucleic acid arrays and kits useful for detecting, or for detecting pre-cancerous colorectal lesions. Preferably, the methods, nucleic acids, nucleic acid arrays and kits for the screening of individuals to identify those at risk of developing colorectal carcinoma.

### BACKGROUND

[0002] Incidence and diagnosis of cancer. Cancer is the second leading cause of death of the United States. Mortality rates could be significantly improved if current screening methods would be improved in terms of patient compliance, sensitivity and ease of screening. Current recommended methods for diagnosis of cancer are often expensive and are not suitable for application as population wide screening tests.

[0003] Hepatocellular cancer (HCC) is the fourth most common cancer in the world, its incidence varies from 2.1 per 100,000 in North America to 80 per 100,000 in China. In the United States, it is estimated that there will be 17,550 new cases diagnosed in 2005 and 15,420 deaths due to this disease. Ultrasound of the liver, alpha fetoprotein levels and conventional CT scan are regularly obtained in the diagnostic evaluation of HCC (hepatocellular cancer or primary liver cancer), but they are often too insensitive to detect multi-focal small lesions and for treatment planning.

[0004] In the United States the annual incidence of colorectal cancer is approximately 150,000, with 56,600 individuals dying form colorectal cancer each year. The lifetime risk of colorectal cancer in the general population is about 5 to 6 percent. Despite intensive efforts in recent years in screening and early detection of colon cancer, until today most cases are diagnosed in an advanced stage with regional or distant metastasis. While the therapeutic options include surgery and adjuvant or palliative chemotherapy, most patients die from progression of their cancer within a few months. Identifying the molecular changes that underlie the development of colon cancer may help to develop new monitoring, screening, diagnostic and therapeutic options that could improve the overall poor prognosis of these patients.

[0005] The current guidelines for colorectal screening according to the American Cancer Society utilizes one of five different options for screening in average risk individuals 50 years of age or older. These options include 1) fecal occult blood test (FOBT) annually, 2) flexible sigmoidoscopy every five years, 3) annual FPBT plus flexible sigmoidoscopy every five years, 4) double contrast barium enema (DCBE) every five years or 5) colonoscopy every ten years. Even though these testing procedures are well accepted by the medical community, the implementation of widespread screening for colorectal cancer has not been realized. Patient compliance is a major factor for limited use due to the discomfort or inconvenience associated with the procedures. FOBT testing, although a non-invasive procedure, requires dietary and other restrictions 3-5 days prior to testing. Sensitivity levels for this test are also very low for colorectal adenocarcinoma with wide variability depending on the trial. Sensitivity measurements for detection of adenomas is even less since most adenomas do not bleed. In contrast, sensitivity for more invasive procedures such as sigmoidoscopy and colonoscopy are quite high because of direct visualization of the lumen of the colon. No randomized trials have evaluated the efficacy of these techniques, however, using data from case-control studies and data from the National Polyp Study (U.S.) it has been shown that removal of adenomatous polyps results in a 76-90% reduction in CRC incidence. Sigmoidoscopy has the limitation of only visualizing the left side of the colon leaving lesions in the right colon undetected. Both scoping procedures are expensive, require cathartic preparation and have increased risk of morbidity and mortality. Improved tests with increased sensitivity, specificity, ease of use and decreased costs are clearly needed before general widespread screening for colorectal cancer becomes routine.

[0006] Early colorectal cancer detection is generally based on the fecal occult blood test (FOBT) performed annually on asymptomatic individuals. Current recommendations adapted by several healthcare organizations, including the American Cancer Society, call for fecal occult blood testing beginning at age 50, repeated annually until such time as the patient would no longer benefit from screening. A positive FOBT leads to colonoscopic examination of the bowel; an expensive and invasive procedure, with a serious complication rate of one per 5,000 examinations. Only 12% of patients with heme positive stool are diagnosed with cancer or large polyps at the time of colonoscopy. A number of studies show that FOBT screening does not improve cancer-related mortality or overall survival. Compliance with occult blood testing has been poor; less than 20 percent of the population is offered or completes FOBT as recommended. If FOBT is properly done, the patient collects a fecal sample from three consecutive bowel movements. Samples are obtained while the patient adheres to dietary guidelines and avoids medications known to induce occult gastrointestinal bleeding. In reality, physicians frequently fail to instruct patients properly, patients frequently fail to adhere to protocol, and some patients find the task of collecting fecal samples difficult or unpleasant, hence compliance with annual occult blood testing is poor. If testing sensitivity and specificity can be improved over current methods, the frequency of testing could be reduced, collection of consecutive samples would be eliminated, dietary and medication schedule modifications would be eliminated, and patient compliance would be enhanced. Compounding the problem of compliance, the sensitivity and specificity of FOBT to detect colon cancer is poor. Poor test specificity leads to unnecessary colonoscopy, adding considerable expense to colon cancer screening.

[0007] Specificity of the FOBT has been calculated at best to be 96%, with a sensitivity of 43% (adenomas) and 50% (colorectal carcinoma). Sensitivity can be improved using an immunoassay FOBT such as that produced under the tradename ‘InSure™’, with an improved sensitivity of 77% (adenomas) and 88.9% (colorectal carcinoma.

[0008] Molecular disease markers. Molecular disease markers offer several advantages over other types of markers, one advantage being that even samples of very small sizes and/or samples whose tissue architecture has not been maintained can be analyzed quite efficiently. Within the last decade a number of genes have been shown to be differentially expressed between normal and colon carcinomas. However, no single or combination of marker has been shown to be sufficient for the diagnosis of colon carcinomas. High-dimensional mRNA based approaches have recently been shown to be able to provide a better means to distinguish between different tumor types and benign and malignant lesions. However its application as a routine diagnostic tool in a clinical environment is impeded by the extreme instability of mRNA, the rapidly occurring expression changes following certain triggers (e.g., sample collection), and, most importantly, the large amount of mRNA needed for analysis (Lipshutz, R. J. et al., Nature Genetics 21:20-24, 1999; Bowtell, D. D. L. Nature genetics suppl. 21:25-32, 1999), which often cannot be obtained from a routine biopsy.

[0009] The use of biological markers to further improve sensitivity and specificity of FOBT has been suggested, examples of such tests include the PreGen-Plus™ stool analysis assay available from EXACT Sciences which has a sensitivity of 20% (adenoma) and 52% (colorectal carcinoma) and a specificity of 95% in both cases. This test assays for the presence of 23 DNA mutations associated with the development of colon neoplasms. The use of DNA methylation as colon cancer markers is known. For example Sabbioni et al. (Molecular Diagnosis 7:201-207, 2003) detected hypermethylation of a panel of genes consisting of TPEF, HICl, DAPK and MGMT in peripheral blood in 98% of colon carcinoma patients. However, this does provide a suitable basis for a commercially marketable test, as the specificity of such a test must also be sufficiently high.

[0010] The current model of colorectal pathogenesis favours a stepwise progression of adenomas, which includes the development of dysplasia and finally signs of invasive cancer. The molecular changes underlying this adenoma-carcinoma sequence include genetic and epigenetic alterations of tumour suppressor genes (APC, p53, DCC), the activation of oncogenes (K-ras) and the inactivation of DNA mismatch repair genes. Recently, further molecular changes and genetic defects have been revealed. Thus, activation of the Wnt signalling pathway not only includes mutations of the APC gene, but may also result from β-catenin mutations. Furthermore, alterations in the TGF-β signalling pathway together with its signal transducers SMAD4 and SMAD2 have been linked to the development of colon cancer.

[0011] Despite recent progress in the understanding of the pathogenesis of adenomas and carcinomas of the colon and their genetic and molecular changes, the genetic and epigenetic changes underlying the development of metastasis are less well understood. It is, however, generally well accepted that the process of invasion and proteolysis of the extracellular matrix, as well as infiltration of the vascular basement membrane involve adhesive proteins, such as members of the family of integrin receptors, the cadherins, the immunoglobulin superfamily, the laminin binding protein and the CD44 receptor. Apart from adhesion, the process of metastasis formation also includes the induction and regulation of angiogenesis (VEGF, bFGF), the induction of cell proliferation (EGF, HGF, IGF) and the activation of proteolytic enzymes (MMPs, TIMPs, uPAR), as well as the inhibition of apoptosis (Bcl-2, Bcl-X). More recently other groups have compared the genetic and molecular changes in metastatic lesions to the changes found in primary colorectal cancers. Thus, Kleeff et al. reported the loss of DOC-2, a candidate tumour suppressor gene, both in primary and metastatic colorectal cancer. Furthermore, Zauber et al. reported that in their series of 42 colorectal cancers Ki-ras mutations in the primary cancers were identical in all of the 42 paired primary and synchronous metastatic lesions. Similarly loss of heterozygosity at the APC locus was identical for 39 paired carcinomas and synchronous metastasis. The authors concluded that for Ki-ras and APC genes the genetic changes in metastasis are identical to the primary colorectal cancer. However, other groups have found genetic and molecular changes in metastatic colon cancers, that are not present in the primary cancers. Thus, the development of LOH of chromosome 3p in colorectal metastasis has been reported. In addition, using comparative genomic hybridization several alterations were found in liver metastasis that were unique to metastastic lesions (-9q, -11q, and -17q).

[0012] CpG island methylation. Apart from mutations aberrant methylation of CpG islands has been shown to lead to the transcriptional silencing of certain genes that have been previously linked to the pathogenesis of various cancers. CpG islands are short sequences which are rich in CpG dinucleotides and can usually be found in the 5′ region of approximately 50% of all human genes. Methylation of the cytosines in these islands leads to the loss of gene expression and has been reported in the inactivation of the X chromosome and genomic imprinting.

[0013] Multifactorial approach. Cancer diagnostics has traditionally relied upon the detection of single molecular markers (e.g., gene mutations, elevated PSA levels). Unfortunately, cancer is a disease state in which single markers have typically failed to detect or differentiate many forms of the disease. Thus, assays that recognize only a single marker have been shown to be of limited predictive value. A fundamental aspect of this invention is that methylation-based cancer diagnostics and the screening, diagnosis, and therapeutic monitoring of such diseases will provide significant improvements over the state-of-the-art that uses single marker analyses by the use of a selection of multiple markers. The multiplexed analytical approach is particularly well suited for cancer diagnostics since cancer is not a simple disease, this multi-factorial “panel” approach is consistent with the heterogeneous nature of cancer, both cytologically and clinically.

[0014] Key to the successful implementation of a panel approach to methylation based diagnostic tests is the design and development of optimized panels of markers that can characterize and distinguish disease states. The present invention describes a plurality of particularly efficient and unique panels of genes, the methylation analysis of one or a combination of the members of the panel enabling the detection of colon cell proliferative disorders with a particularly high sensitivity, specificity and/or predictive value.

[0015] Development of medical tests. Two key evaluative measures of any medical screening or diagnostic test are its sensitivity and specificity, which measure how well the test performs to accurately detect all affected individuals without exception, and without falsely including individuals who do not have the target disease (predictive value). Historically, many diagnostic tests have been criticized due to poor sensitivity and specificity.

[0016] A true positive (TP) result is where the test is positive and the condition is present. A false positive (FP) result is where the test is positive but the condition is not present. A true negative (TN) result is where the test is negative and the condition is not present. A false negative (FN) result is where the test is negative but the condition is not present. In this context: Sensitivity=TP/(TP+FN); Specificity=TN/(FP+TN); and Predictive value=TP/(TP+FP).

[0017] Sensitivity is a measure of a test's ability to correctly detect the target disease in an individual being tested. A test having poor sensitivity produces a high rate of false negatives, i.e., individuals who have the disease but are falsely identified as being free of that particular disease. The potential danger of a false negative is that the diseased individual will remain undiagnosed and untreated for some period of time, during which the disease may progress to a later stage wherein treatments, if any, may be less effective. An example of a test that has low sensitivity is a protein-based blood test for HIV. This type of test exhibits poor sensitivity because it fails to detect the presence of the virus until the disease is well established and the virus has invaded the bloodstream in substantial numbers. In contrast, an example of a test that has high sensitivity is viral-load detection using the polymerase chain reaction (PCR). High sensitivity is achieved because this type of test can detect very small quantities of the virus. High sensitivity is particularly important when the consequences of missing a diagnosis are high.

[0018] Specificity, on the other hand, is a measure of a test's ability to identify accurately patients who are free of the disease state. A test having poor specificity produces a high rate of false positives, i.e., individuals who are falsely identified as having the disease. A drawback of false positives is that they force patients to undergo unnecessary medical procedures treatments with their attendant risks, emotional and financial stresses, and which could have adverse effects on the patient's health. A feature of diseases which makes it difficult to develop diagnostic tests with high specificity is that disease mechanisms, particularly in cancer, often involve a plurality of genes and proteins. Additionally, certain proteins may be elevated for reasons unrelated to a disease state. An example of a test that has high specificity is a gene-based test that can detect a p53 mutation. Specificity is important when the cost or risk associated with further diagnostic procedures or further medical intervention are very high.

[0019] Pronounced need in the art. It is generally accepted that there is a pronounced need in the art for improved screening and early detection of cancers. As an example, if colon cancer screening specificity can be increased, the problem of false positive test results leading to unnecessary colonoscopic examination would be reduced leading to cost savings and improved safety.

[0020] In view of the incidence of cancers in general and more particularly the disadvantages associated with current colorectal cell proliferative disorder screening methods there is a substantial need in the art for improved methods for the early detection of cancer, in particular colon cancer, to be used in addition to or as a substitute for currently available tests.

[0021] Background of the genes of the present invention. The human Septin 9 gene (also known as MLL septin-like fusion protein, MLL septin-like fusion protein MSF-A, Slpa, Eseptin, Msf, septin-like protein Ovarian/Breast septin (Ov/Br septin) and Septin D1) is located on chromosome 17q25 within contig AC068594.15.1.168501 and is a member of the Septin gene family. SEQ ID NO: 1 provides the sequence of said gene, comprising regions of both the Septin 9 and Q9HC74 transcripts and promoter regions.

[0022] It has been postulated that members of the Septin gene family are associated with multiple cellular functions ranging from vesicle transport to cytokinesis. Disruption of the action of Septin 9 results in incomplete cell division, see Surka, M. C., Tsang, C. W., and Trimble, W. S. Mol Biol Cell, 13: 3532-45 (2002). Septin 9 and other proteins have been shown to be fusion partners of the proto-oncogene MLL suggesting a role in tumorigenesis, see Osaka, M, Rowley, J. D. and Zeleznik-Le, N. J. PNAS, 96:6428-6433 (1999). Burrows et al. reported an in depth study of expression of the multiple isoforms of the Septin 9 gene in ovarian cancer and showed tissue specific expression of various transcripts, see Burrows, J. F., Chanduloy, et al. S. E. H. Journal of Pathology, 201:581-588 (2003).

[0023] A recent study of over 7000 normal and tumor tissues indicates that there is consistent over-expression of Septin 9 isoforms in a number of tumor tissues, see Scott, M., Hyland, P. L., et al. Oncogene, 24: 4688-4700 (2005). The authors speculate that the gene is likely a type II cancer gene where changes in RNA transcript processing control regulation of different protein products, and the levels of these altered protein isoforms may provide answers to the gene's role in malignancy.

[0024] The ALX4 gene is a putative transcription factor that belongs to the family of paired-class homeoproteins. This gene is part of a family of genes that includes the mammalian genes Alx3, Cart-1, MHox, and S8 and exhibits similarity to the Drosophila gene aristaless. It binds palindromic DNA sequences (5′-TAAT-3′) as either homodimers or as heterodimers with other family members and strongly activates transcription from a promoter containing the homeodomain binding site, P2. ALX4 is expressed at several sites during development, including the craniofacial and limb-bud mesenchyme. Interestingly, ALX4 deficient mice exhibit body-wall defects, preaxial polydactyly, and a decreased size of the parietal plate of the skull, while mutations of the human homeobox gene ALX4 have been found in inherited defects of skull ossification. ALX4 is also expressed in various tissues whose development is dependent on epithelial-mesenchymal interactions and regulates mesenchymal-specific activities of LEF-1.

[0025] Methylation of the gene ALX4 has been previously disclosed in WO 2004/035803. In said document it was disclosed that ALX4 was methylated accross all classes of colon adenoma and polyp classes, with no differentation between benign, malignant and pre-malignant classes thereof. The subject matter of the present invention differs from that of WO 2004/035803 in that the method of the present invention is practised on body fluid isolated from a subject. The technical effect of practising the method on body fluid samples is that it enables the differentiation between benign and pre-cancerous lesions. Thus the technical problem to be solved by the present invention is how to differentiate between harmless (i.e. benign) and potentially harmful (i.e. those undergoing malignant transformation) colorectal lesions. The person of skill in the art when taking the teachings of WO 2004/035803 into account would not be led to analyse the methylation of said markers in body fluids as opposed to e.g. a histological sample.

### SUMMARY OF THE INVENTION

[0026] The present invention provides a method for determining the presence or absence of pre-cancerous colorectal lesions in a subject comprising determining the expression levels of at least one gene or genomic sequence selected from the group consisting of Septin 9 (including all transcript variants thereof) and ALX4 in a body fluid sample isolated from said subject wherein underexpression and/or CpG methylation is indicative of the presence of said lesions. Alternatively, said invention provides a method for the differentiation of pre-cancerous from benign colorectal lesions. Various aspects of the present invention provide an efficient and unique genetic marker, whereby expression analysis of said marker enables the detection of pre-cancerous lesions with a particularly high sensitivity, specificity and/or predictive value. The inventive testing methods have particular utility for the screening of at-risk populations. The inventive methods have advantages over prior art methods (including the industry standard FOBT) because it enables the detection of colorectal lesions undergoing malignant transformation but prior to the development of cancer. Furthermore the high sensitivity and specificity as well as non-invasiveness of such a test is likely to result in increased patient compliance.

[0027] In one embodiment the invention provides a method for detecting and/or classifying cell proliferative disorders in a subject comprising determining the expression levels of at least one gene or genomic sequence selected from the group consisting of Septin 9 (including all transcript variants thereof) and ALX4 in a body fluid sample isolated from said subject wherein under-expression and/or CpG methylation is indicative of the presence or class of said disorder. In one embodiment said expression level is determined by detecting the presence, absence or level of mRNA transcribed from said gene. In a further embodiment said expression level is determined by detecting the presence, absence or level of a polypeptide encoded by said gene or sequence thereof.

[0028] In a further preferred embodiment said expression is determined by detecting the presence or absence of CpG methylation within said gene(s), wherein the presence of methylation indicates the presence of a cell proliferative lesion undergoing or having already achieved malignant transformation. Said method comprises the following steps: i) contacting genomic DNA isolated from a body fluid sample (preferably selected from the group consisting of blood plasma, blood serum, whole blood, isolated blood cells, cells isolated from the blood) obtained from the subject with at least one reagent, or series of reagents that distinguishes between methylated and non-methylated CpG dinucleotides within at least one target region of the genomic DNA, wherein the nucleotide sequence of said target region comprises at least one CpG dinucleotide sequence of at least one gene or genomic sequence selected from the group consisting of Septin 9 (including all transcript variants thereof) and ALX4; and ii) detecting and/or classifying cell proliferative disorders, at least in part. Preferably the target region comprises, or hybridizes under stringent conditions to a sequence of at least 16 contiguous nucleotides of at least one sequence selected from the group consisting of SEQ ID NO: 1 to SEQ ID NO: 2.

[0029] The method is novel as no methods currently exist that enable the early detection of potentially harmful colorectal lesions. For example, current methods used to detect and diagnose colorectal carcinoma include colonoscopy, sigmoidoscopy, and fecal occult blood colon cancer. In comparison to these methods, the disclosed invention is much less invasive than colonoscopy, and as, if not more sensitive than sigmoidoscopy and FOBT while enabling the detection of harmful lesions before reaching the carcinoma stage. The development of a body fluid assay represents a clear technical advantage over current methods known in the art in that it is anticipated that at least for colorectal carcinoma screening patient compliance for a single body fluid based test will be higher than the triplicate analysis of stool currently recommended for FOBT.

[0030] A particular embodiment of the method comprises the use of at least one gene or genomic sequence selected from the group consisting of Septin 9 (including all transcript variants thereof) and ALX4 as a marker for the detection and/or classification of colorectal cellular proliferative disorders. The present invention is particularly suited for the detection of pre-cancerous colorectal cellular proliferative disorders undergoing malignant transformation. Said use of the gene may be enabled by means of any analysis of the expression of the gene, by means of mRNA expression analysis or protein expression analysis. However, in the most preferred embodiment of the invention, the detection, differentiation and distinguishing of colorectal cell proliferative disorders is enabled by means of analysis of the methylation status of at least one gene or genomic sequence selected from the group consisting of Septin 9 (including all transcript variants thereof) and ALX4 and their promoter or regulatory elements.

[0031] The invention provides a method for the analysis of biological samples for features associated with the development of pre-cancerous cellular proliferative disorders, the method characterized in that at least one nucleic acid, or a fragment thereof, from the group consisting of SEQ ID NO: 1 TO SEQ ID NO: 2 is contacted with a reagent or series of reagents capable of distinguishing between methylated and non methylated CpG dinucleotides within the genomic sequence, or sequences of interest.

[0032] The present invention provides a method for ascertaining epigenetic parameters of genomic DNA associated with the development of malignant colorectal cellular proliferative disorders, the method has utility for the improved diagnosis, treatment and monitoring of said diseases.

[0033] Preferably, the source of the test sample is selected from the group consisting of cells or cell lines, histological slides, biopsies, paraffin-embedded tissue, body fluids, stool, urine, blood, and combinations thereof. More preferably, the source is selected from the group consisting of stool, blood plasma, blood serum, whole blood, isolated blood cells, cells isolated from the blood obtained from the subject.

[0034] Specifically, the present invention provides a method for detecting pre-cancerous colorectal cellular proliferative disorders or for differentiating between pre-cancerous and benign cellular proliferative disorders, comprising: obtaining a body fluid sample comprising genomic nucleic acid(s); contacting the nucleic acid(s), or a fragment thereof, with one reagent or a plurality of reagents sufficient for distinguishing between methylated and non methylated CpG dinucleotide sequences within at least one target sequence of the subject nucleic acid, wherein the target sequence comprises, or hybridises under stringent conditions to, a sequence comprising at least 16 contiguous nucleotides of a sequence selected from the group consisting SEQ ID NO: 1 TO SEQ ID NO: 2, said contiguous nucleotides comprising at least one CpG dinucleotide sequence; and determining, based at least in part on said distinguishing, the methylation state of at least one target CpG dinucleotide sequence, or an average, or a value reflecting an average methylation state of a plurality of target CpG dinucleotide sequences.

[0035] Preferably, distinguishing between methylated and non methylated CpG dinucleotide sequences within the target sequence comprises methylation state-dependent conversion or non-conversion of at least one such CpG dinucleotide sequence to the corresponding converted or non-converted dinucleotide sequence within a sequence selected from the group consisting of SEQ ID NO: 3 to SEQ ID NO: 10, and contiguous regions thereof corresponding to the target sequence.

[0036] Further embodiments provide alternative methods comprising: obtaining a body fluid sample having subject genomic DNA; extracting the genomic DNA; contacting the genomic DNA, or a fragment thereof, comprising one or more sequences selected from the group consisting of SEQ ID NO: 1 to SEQ ID NO: 2 or a sequence that hybridizes under stringent conditions thereto, with one or more methylation-sensitive restriction enzymes, wherein the genomic DNA is either digested thereby to produce digestion fragments, or is not digested thereby; and determining, based on a presence or absence of, or on property of at least one such fragment, the methylation state of at least one CpG dinucleotide sequence of at least one genomic sequence selected form the group consisting of SEQ ID NO: 1 TO SEQ ID NO: 2, or an average, or a value reflecting an average methylation state of a plurality of CpG dinucleotide sequences thereof. Preferably, the digested or undigested genomic DNA is amplified prior to said determining.

[0037] Additional embodiments provide genomic and chemically modified nucleic acid sequences, as well as oligonucleotides and/or PNA-oligomers for analysis of cytosine methylation patterns within sequences from the group consisting of SEQ ID NO: 1 to SEQ ID NO: 2.

### DETAILED DESCRIPTION OF THE INVENTION

[0038] Definitions:

[0039] The term “Observed/Expected Ratio” (“O/E Ratio”) refers to the frequency of CpG dinucleotides within a particular DNA sequence, and corresponds to the [number of CpG sites/(number of C bases×number of G bases)]/band length for each fragment.

[0040] The term “CpG island” refers to a contiguous region of genomic DNA that satisfies the criteria of (1) having a frequency of CpG dinucleotides corresponding to an “Observed/Expected Ratio” >0.6, and (2) having a “GC Content” >0.5. CpG islands are typically, but not always, between about 0.2 to about 1 KB, or to about 2 kb in length.

[0041] The term “methylation state” or “methylation status” refers to the presence or absence of 5-methylcytosine (“5-mCyt”) at one or a plurality of CpG dinucleotides within a DNA sequence. Methylation states at one or more particular CpG methylation sites (each having two CpG dinucleotide sequences) within a DNA sequence include “unmethylated,” “fully-methylated” and “hemi-methylated.”

[0042] The term “hemi-methylation” or “hemimethylation” refers to the methylation state of a double stranded DNA wherein only one strand thereof is methylated.

[0043] The term ‘AUC’ as used herein is an abbreviation for the area under a curve. In particular it refers to the area under a Receiver Operating Characteristic (ROC) curve. The ROC curve is a plot of the true positive rate against the false positive rate for the different possible cut points of a diagnostic test. It shows the trade-off between sensitivity and specificity depending on the selected cut point (any increase in sensitivity will be accompanied by a decrease in specificity). The area under an ROC curve (AUC) is a measure for the accuracy of a diagnostic test (the larger the area the better, optimum is 1, a random test would have a ROC curve lying on the diagonal with an area of 0.5; for reference: J. P. Egan. Signal Detection Theory and ROC Analysis, Academic Press, New York, 1975).

[0044] The term “hypermethylation” refers to the average methylation state corresponding to an increased presence of 5-mCyt at one or a plurality of CpG dinucleotides within a DNA sequence of a test DNA sample, relative to the amount of 5-mCyt found at corresponding CpG dinucleotides within a normal control DNA sample.

[0045] The term “hypomethylation” refers to the average methylation state corresponding to a decreased presence of 5-mCyt at one or a plurality of CpG dinucleotides within a DNA sequence of a test DNA sample, relative to the amount of 5-mCyt found at corresponding CpG dinucleotides within a normal control DNA sample.

[0046] The term “microarray” refers broadly to both “DNA microarrays,” and ‘DNA chip(s),’ as recognized in the art, encompasses all art-recognized solid supports, and encompasses all methods for affixing nucleic acid molecules thereto or synthesis of nucleic acids thereon.

[0047] “Genetic parameters” are mutations and polymorphisms of genes and sequences further required for their regulation. To be designated as mutations are, in particular, insertions, deletions, point mutations, inversions and polymorphisms and, particularly preferred, SNPs (single nucleotide polymorphisms).

[0048] “Epigenetic parameters” are, in particular, cytosine methylation. Further epigenetic parameters include, for example, the acetylation of histones which, however, cannot be directly analysed using the described method but which, in turn, correlate with the DNA methylation.

[0049] The term “bisulfite reagent” refers to a reagent comprising bisulfite, disulfite, hydrogen sulfite or combinations thereof, useful as disclosed herein to distinguish between methylated and unmethylated CpG dinucleotide sequences.

[0050] The term “Methylation assay” refers to any assay for determining the methylation state of one or more CpG dinucleotide sequences within a sequence of DNA.

[0051] The term “MS.AP-PCR” (Methylation-Sensitive Arbitrarily-Primed Polymerase Chain Reaction) refers to the art-recognized technology that allows for a global scan of the genome using CG-rich primers to focus on the regions most likely to contain CpG dinucleotides, and described by Gonzalgo et al., Cancer Research 57:594-599, 1997.

[0052] The term “MethyLight™” refers to the art-recognized fluorescence-based real-time PCR technique described by Eads et al., Cancer Res. 59:2302-2306, 1999.

[0053] The term “HeavyMethyl™” assay, in the embodiment thereof implemented herein, refers to an assay, wherein methylation specific blocking probes (also referred to herein as blockers) covering CpG positions between, or covered by the amplification primers enable methylation-specific selective amplification of a nucleic acid sample.

[0054] The term “HeavyMethyl™ MethyLight™” assay, in the embodiment thereof implemented herein, refers to a HeavyMethyl™ MethyLight™ assay, which is a variation of the MethyLight™ assay, wherein the MethyLight™ assay is combined with methylation specific blocking probes covering CpG positions between the amplification primers.

[0055] The term “Ms-SNuPE” (Methylation-sensitive Single Nucleotide Primer Extension) refers to the art-recognized assay described by Gonzalgo and Jones, Nucleic Acids Res. 25:2529-2531, 1997.

[0056] The term “MSP” (Methylation-specific PCR) refers to the art-recognized methylation assay described by Herman et al. Proc. Natl. Acad Sci. USA 93:9821-9826, 1996, and by U.S. Pat. No. 5,786,146.

[0057] The term “COBRA” (Combined Bisulfite Restriction Analysis) refers to the art-recognized methylation assay described by Xiong and Laird, Nucleic Acids Res. 25:2532-2534, 1997.

[0058] The term “MCA” (Methylated CpG Island Amplification) refers to the methylation assay described by Toyota et al., Cancer Res. 59:2307-12, 1999, and in WO 00/26401A1.

[0059] The term “hybridization” is to be understood as a bond of an oligonucleotide to a complementary sequence along the lines of the Watson-Crick base pairings in the sample DNA, forming a duplex structure.

[0060] “Stringent hybridization conditions,” as defined herein, involve hybridizing at 68° C. in 5×SSC/5× Denhardt's solution/1.0% SDS, and washing in 0.2×SSC/0.1% SDS at room temperature, or involve the art-recognized equivalent thereof (e.g., conditions in which a hybridization is carried out at 60° C. in 2.5×SSC buffer, followed by several washing steps at 37° C. in a low buffer concentration, and remains stable). Moderately stringent conditions, as defined herein, involve including washing in 3×SSC at 42° C., or the art-recognized equivalent thereof. The parameters of salt concentration and temperature can be varied to achieve the optimal level of identity between the probe and the target nucleic acid. Guidance regarding such conditions is available in the art, for example, by Sambrook et al., 1989, Molecular Cloning, A Laboratory Manual, Cold Spring Harbor Press, N.Y.; and Ausubel et al. (eds.), 1995, Current Protocols in Molecular Biology, (John Wiley and Sons, N.Y.) at Unit 2.10.

[0061] The terms “Methylation-specific restriction enzymes” or “methylation-sensitive restriction enzymes” shall be taken to mean an enzyme that selectively digests a nucleic acid dependant on the methylation state of its recognition site. In the case of such restriction enzymes which specifically cut if the recognition site is not methylated or hemimethylated, the cut will not take place, or with a significantly reduced efficiency, if the recognition site is methylated. In the case of such restriction enzymes which specifically cut if the recognition site is methylated, the cut will not take place, or with a significantly reduced efficiency if the recognition site is not methylated. Preferred are methylation-specific restriction enzymes, the recognition sequence of which contains a CG dinucleotide (for instance cgcg or cccggg). Further preferred for some embodiments are restriction enzymes that do not cut if the cytosine in this dinucleotide is methylated at the carbon atom C5.

[0062] “Non-methylation-specific restriction enzymes” or “non-methylation-sensitive restriction enzymes” are restriction enzymes that cut a nucleic acid sequence irrespective of the methylation state with nearly identical efficiency. They are also called “methylation-unspecific restriction enzymes.”

[0063] The term “gene” shall be taken to include all transcript variants thereof (e.g. the term “Septin 9” shall include for example its truncated transcript Q9HC74) and all promoter and regulatory elements thereof. Furthermore as a plurality of SNPs are known within said gene the term shall be taken to include all sequence variants thereof.

[0064] Colorectal lesions which do not have malignant potential are histologically classified as benign and include hyperplastic polyps, hamartomas and inflammatory polyps. Colorectal lesions which do have malignant potential are histologically classified as neoplastic adenomas and include tubular adenomas (0%-25% villious tissue), tubuvillous adenomas (25%-75% villious tissue) and villous adenomas (75%-100% villious tissue).

[0065] The terms “pre-cancerous” or “pre-malignant” and equivalents thereof shall be taken to mean any cellular proliferative disorder which is undergoing malignant transformation, such as but not limited to neoplastic adenomas including those described above. Examples of such conditions include, in the context of colorectal cellular proliferative disorders, cellular proliferative disorders (such as but not limited to those commonly referred to as “polyps”) with a high degree of dysplasia and the following classes of adenomas:

[0066] Level 1: penetration of malignant glands through the muscularis mucosa into the submucosa, within the polyp head;

[0067] Level 2: the same submucosal invasion, but present at the junction of the head to the stalk;

[0068] Level 3: invasion of the stalk; and

[0069] Level 4: invasion of the stalk's base at the connection to the colonic wall (this level corresponds to stage Dukes A).

[0070] Overview:

[0071] The present invention provides a method for detecting pre-cancerous colorectal cell proliferative disorders (e.g. neoplastic adenomas) or for differentiating between benign colorectal lesions and pre-malignant colorectal lesions in a subject comprising determining the expression levels of at least one gene or genomic sequence selected from the group consisting of Septin 9 (including all transcript variants thereof) and ALX4 in a biological sample isolated from said subject wherein underexpression and/or CpG methylation is indicative of the presence of said disorder. Preferably the expression levels of both Septin 9 (including any transcript variants thereof) and ALX4 are analysed. Said markers may be used for the early detection of colorectal cancers during the pre-cancerous stages of the disease both by detecting the presence thereof and/or differentiating between benign and malignant forms of colorectal lesions.

[0072] In a first embodiment the present invention is based upon the analysis of CpG methylation status of at least one gene or genomic sequence selected from the group consisting of Septin 9 (including all transcript variants thereof) and ALX4. Preferably the methylation status of both Septin 9 (including any transcript variants thereof) and ALX4 are analyzed. It is further preferred that the sequences of said genes are as according to TABLE 1.

[0073] Bisulfite modification of DNA is an art-recognized tool used to assess CpG methylation status. 5-methylcytosine is the most frequent covalent base modification in the DNA of eukaryotic cells. It plays a role, for example, in the regulation of the transcription, in genetic imprinting, and in tumorigenesis. Therefore, the identification of 5-methylcytosine as a component of genetic information is of considerable interest. However, 5-methylcytosine positions cannot be identified by sequencing, because 5-methylcytosine has the same base pairing behavior as cytosine. Moreover, the epigenetic information carried by 5-methylcytosine is completely lost during, e.g., PCR amplification.

[0074] The most frequently used method for analyzing DNA for the presence of 5-methylcytosine is based upon the specific reaction of bisulfite with cytosine whereby, upon subsequent alkaline hydrolysis, cytosine is converted to uracil which corresponds to thymine in its base pairing behavior. Significantly, however, 5-methylcytosine remains unmodified under these conditions. Consequently, the original DNA is converted in such a manner that methylcytosine, which originally could not be distinguished from cytosine by its hybridization behavior, can now be detected as the only remaining cytosine using standard, art-recognized molecular biological techniques, for example, by amplification and hybridization, or by sequencing. All of these techniques are based on differential base pairing properties, which can now be fully exploited.

[0075] The prior art, in terms of sensitivity, is defined by a method comprising enclosing the DNA to be analyzed in an agarose matrix, thereby preventing the diffusion and renaturation of the DNA (bisulfite only reacts with single-stranded DNA), and replacing all precipitation and purification steps with fast dialysis (Olek A, et al., A modified and improved method for bisulfite based cytosine methylation analysis, Nucleic Acids Res. 24:5064-6, 1996). It is thus possible to analyze individual cells for methylation status, illustrating the utility and sensitivity of the method. An overview of art-recognized methods for detecting 5-methylcytosine is provided by Rein, T., et al., Nucleic Acids Res., 26:2255, 1998.

[0076] The bisulfite technique, barring few exceptions (e.g., Zeschnigk M, et al., Eur J Hum Genet. 5:94-98, 1997), is currently only used in research. In all instances, short, specific fragments of a known gene are amplified subsequent to a bisulfite treatment, and either completely sequenced (Olek and Walter, Nat Genet. 1997 17:275-6, 1997), subjected to one or more primer extension reactions (Gonzalgo and Jones, Nucleic Acids Res., 25:2529-31, 1997; WO 95/00669; U.S. Pat. No. 6,251,594) to analyze individual cytosine positions, or treated by enzymatic digestion (Xiong and Laird, Nucleic Acids Res., 25:2532-4, 1997). Detection by hybridization has also been described in the art (Olek et al., WO 99/28498). Additionally, use of the bisulfite technique for methylation detection with respect to individual genes has been described (Grigg and Clark, Bioessays, 16:431-6, 1994; Zeschnigk M, et al., Hum Mol Genet., 6:387-95, 1997; Feil R, et al., Nucleic Acids Res., 22:695-, 1994; Martin V, et al., Gene, 157:261-4, 1995; WO 9746705 and WO 9515373).

[0077] The present invention provides for the use of the bisulfite technique, in combination with one or more methylation assays, for determination of the methylation status of CpG dinucleotide sequences within at least one sequence selected from the group consisting SEQ ID NO: 1 TO SEQ ID NO: 2. It is particularly preferred that CpG positions of the gene ALX4 within bases 42,700-52,000 of SEQ ID NO: 1 (or said positions within the equivalent bisulfite converted sequences) are analyzed. It is particularly preferred that CpG positions of the gene Septin 9 within bases 1,000-4,250 or 93,850-96,000 of SEQ ID NO: 2 (or said positions within the equivalent bisulfite converted sequences) are analysed. Genomic CpG dinucleotides can be methylated or unmethylated (alternatively known as up- and down-methylated respectively). However the methods of the present invention are suitable for the analysis of biological samples of a heterogeneous nature, e.g., a low concentration of colorectal cells within a background of blood or stool. Accordingly, when analyzing the methylation status of a CpG position within such a sample the person skilled in the art may use a quantitative assay for determining the level (e.g., percent, fraction, ratio, proportion or degree) of methylation at a particular CpG position as opposed to a methylation state. Accordingly the term methylation status or methylation state should also be taken to mean a value reflecting the degree of methylation at a CpG position. Unless specifically stated the terms “hypermethylated” or “upmethylated” shall be taken to mean a methylation level above that of a specified cut-off point, wherein said cut-off may be a value representing the average or median methylation level for a given population, or is preferably an optimized cut-off level. The “cut-off” is also referred herein as a “threshold”. In the context of the present invention the terms “methylated”, “hypermethylated” or “upmethylated” shall be taken to include a methylation level above the cut-off be zero (0) % (or equivalents thereof) methylation for all CpG positions within and associated with (e.g. in promoter or regulatory regions) the genes selected from the group consisting of Septin 9 (including all transcript variants thereof) and ALX4.

[0078] According to the present invention, determination of the methylation status of CpG dinucleotide sequences within SEQ ID NO: 1 TO SEQ ID NO: 2 has utility in the detection of colorectal lesions undergoing malignant transformation and thus in the early detection of colorectal cancers.

[0079] Methylation Assay Procedures. Various methylation assay procedures are known in the art, and can be used in conjunction with the present invention. These assays allow for determination of the methylation state of one or a plurality of CpG dinucleotides (e.g., CpG islands) within a DNA sequence. Such assays involve, among other techniques, DNA sequencing of bisulfite-treated DNA, PCR (for sequence-specific amplification), Southern blot analysis, and use of methylation-sensitive restriction enzymes.

[0080] For example, genomic sequencing has been simplified for analysis of DNA methylation patterns and 5-methylcytosine distribution by using bisulfite treatment (Frommer et al., Proc. Natl. Acad. Sci. USA 89:1827-1831, 1992). Additionally, restriction enzyme digestion of PCR products amplified from bisulfite-converted DNA is used, e.g., the method described by Sadri and Hornsby (Nucl. Acids Res. 24:5058-5059, 1996), or COBRA (Combined Bisulfite Restriction Analysis) (Xiong and Laird, Nucleic Acids Res. 25:2532-2534, 1997).

[0081] COBRA. COBRA™ analysis is a quantitative methylation assay useful for determining DNA methylation levels at specific gene loci in small amounts of genomic DNA (Xiong and Laird, Nucleic Acids Res. 25:2532-2534, 1997). Briefly, restriction enzyme digestion is used to reveal methylation-dependent sequence differences in PCR products of sodium bisulfite-treated DNA. Methylation-dependent sequence differences are first introduced into the genomic DNA by standard bisulfite treatment according to the procedure described by Frommer et al. (Proc. Natl. Acad. Sci. USA 89:1827-1831, 1992). PCR amplification of the bisulfite converted DNA is then performed using primers specific for the CpG islands of interest, followed by restriction endonuclease digestion, gel electrophoresis, and detection using specific, labeled hybridization probes. Methylation levels in the original DNA sample are represented by the relative amounts of digested and undigested PCR product in a linearly quantitative fashion across a wide spectrum of DNA methylation levels. In addition, this technique can be reliably applied to DNA obtained from micro-dissected paraffin-embedded tissue samples.

[0082] Typical reagents (e.g., as might be found in a typical COBRA™-based kit) for COBRA™ analysis may include, but are not limited to: PCR primers for specific gene (or bisulfite treated DNA sequence or CpG island); restriction enzyme and appropriate buffer; gene-hybridization oligonucleotide; control hybridization oligonucleotide; kinase labeling kit for oligonucleotide probe; and labeled nucleotides. Additionally, bisulfite conversion reagents may include: DNA denaturation buffer; sulfonation buffer; DNA recovery reagents or kits (e.g., precipitation, ultrafiltration, affinity column); desulfonation buffer; and DNA recovery components.

[0083] Preferably, assays such as “MethyLight™” (a fluorescence-based real-time PCR technique) (Eads et al., Cancer Res. 59:2302-2306, 1999), Ms-SNuPE™ (Methylation-sensitive Single Nucleotide Primer Extension) reactions (Gonzalgo and Jones, Nucleic Acids Res. 25:2529-2531, 1997), methylation-specific PCR (“MSP”; Herman et al., Proc. Natl. Acad. Sci. USA 93:9821-9826, 1996; U.S. Pat. No. 5,786,146), and methylated CpG island amplification (“MCA”; Toyota et al., Cancer Res. 59:2307-12, 1999) are used alone or in combination with other of these methods.

[0084] The “HeavyMethyl™” assay, technique is a quantitative method for assessing methylation differences based on methylation specific amplification of bisulfite treated DNA. Methylation specific blocking probes (also referred to herein as blockers) covering CpG positions between, or covered by the amplification primers enable methylation-specific selective amplification of a nucleic acid sample.

[0085] The term “HeavyMethyl™ MethyLight™” assay, in the embodiment thereof implemented herein, refers to a HeavyMethyl™ MethyLight™ assay, which is a variation of the MethyLight™ assay, wherein the MethyLight™ assay is combined with methylation specific blocking probes covering CpG positions between the amplification primers. The HeavyMethyl™ assay may also be used in combination with methylation specific amplification primers.

[0086] Typical reagents (e.g., as might be found in a typical MethyLight□-based kit) for HeavyMethyl™ analysis may include, but are not limited to: PCR primers for specific genes (or bisulfite treated DNA sequence or CpG island); blocking oligonucleotides; optimized PCR buffers and deoxynucleotides; and Taq polymerase.

[0087] MSP. MSP (methylation-specific PCR) allows for assessing the methylation status of virtually any group of CpG sites within a CpG island, independent of the use of methylation-sensitive restriction enzymes (Herman et al. Proc. Natl. Acad. Sci. USA 93:9821-9826, 1996; U.S. Pat. No. 5,786,146). Briefly, DNA is modified by sodium bisulfite converting all unmethylated, but not methylated cytosines to uracil, and subsequently amplified with primers specific for methylated versus unmethylated DNA. MSP requires only small quantities of DNA, is sensitive to 0.1% methylated alleles of a given CpG island locus, and can be performed on DNA extracted from paraffin-embedded samples. Typical reagents (e.g., as might be found in a typical MSP-based kit) for MSP analysis may include, but are not limited to: methylated and unmethylated PCR primers for specific gene (or bisulfite treated DNA sequence or CpG island), optimized PCR buffers and deoxynucleotides, and specific probes.

[0088] MethyLight™. The MethyLight™ assay is a high-throughput quantitative methylation assay that utilizes fluorescence-based real-time PCR (TaqMan®) technology that requires no further manipulations after the PCR step (Eads et al., Cancer Res. 59:2302-2306, 1999). Briefly, the MethyLight™ process begins with a mixed sample of genomic DNA that is converted, in a sodium bisulfite reaction, to a mixed pool of methylation-dependent sequence differences according to standard procedures (the bisulfite process converts unmethylated cytosine residues to uracil). Fluorescence-based PCR is then performed in a “biased” (with PCR primers that overlap known CpG dinucleotides) reaction. Sequence discrimination can occur both at the level of the amplification process and at the level of the fluorescence detection process.

[0089] The MethyLight™ assay may be used as a quantitative test for methylation patterns in the genomic DNA sample, wherein sequence discrimination occurs at the level of probe hybridization. In this quantitative version, the PCR reaction provides for a methylation specific amplification in the presence of a fluorescent probe that overlaps a particular putative methylation site. An unbiased control for the amount of input DNA is provided by a reaction in which neither the primers, nor the probe overlie any CpG dinucleotides. Alternatively, a qualitative test for genomic methylation is achieved by probing of the biased PCR pool with either control oligonucleotides that do not “cover” known methylation sites (a fluorescence-based version of the HeavyMethyl™ and MSP techniques), or with oligonucleotides covering potential methylation sites.

[0090] The MethyLight™ process can by used with any suitable probes e.g. “TaqMan®” , Lightcycler® etc. . . . For example, double-stranded genomic DNA is treated with sodium bisulfite and subjected to one of two sets of PCR reactions using TaqMan® probes; e.g., with MSP primers and/or HeavyMethyl blocker oligonucleotides and TaqMan® probe. The TaqMan® probe is dual-labeled with fluorescent “reporter” and “quencher” molecules, and is designed to be specific for a relatively high GC content region so that it melts out at about 10° C. higher temperature in the PCR cycle than the forward or reverse primers. This allows the TaqMan® probe to remain fully hybridized during the PCR annealing/extension step. As the Taq polymerase enzymatically synthesizes a new strand during PCR, it will eventually reach the annealed TaqMan® probe. The Taq polymerase 5′ to 3′ endonuclease activity will then displace the TaqMan® probe by digesting it to release the fluorescent reporter molecule for quantitative detection of its now unquenched signal using a real-time fluorescent detection system.

[0091] Typical reagents (e.g., as might be found in a typical MethyLight™-based kit) for MethyLight™ analysis may include, but are not limited to: PCR primers for specific gene (or bisulfite treated DNA sequence or CpG island); TaqMan® or Lightcycler® probes; optimized PCR buffers and deoxynucleotides; and Taq polymerase.

[0092] The QM™ (quantitative methylation) assay is an alternative quantitative test for methylation patterns in genomic DNA samples, wherein sequence discrimination occurs at the level of probe hybridization. In this quantitative version, the PCR reaction provides for unbiased amplification in the presence of a fluorescent probe that overlaps a particular putative methylation site. An unbiased control for the amount of input DNA is provided by a reaction in which neither the primers, nor the probe overlie any CpG dinucleotides. Alternatively, a qualitative test for genomic methylation is achieved by probing of the biased PCR pool with either control oligonucleotides that do not “cover” known methylation sites (a fluorescence-based version of the HeavyMethyl™ and MSP techniques), or with oligonucleotides covering potential methylation sites.

[0093] The QM™ process can by used with any suitable probes e.g. “TaqMan®”, Lightcycler® etc. . . . in the amplification process. For example, double-stranded genomic DNA is treated with sodium bisulfite and subjected to unbiased primers and the TaqMan® probe. The TaqMan® probe is dual-labeled with fluorescent “reporter” and “quencher” molecules, and is designed to be specific for a relatively high GC content region so that it melts out at about 10° C. higher temperature in the PCR cycle than the forward or reverse primers. This allows the TaqMan® probe to remain fully hybridized during the PCR annealing/extension step. As the Taq polymerase enzymatically synthesizes a new strand during PCR, it will eventually reach the annealed TaqMan® probe. The Taq polymerase 5′ to 3′ endonuclease activity will then displace the TaqMan® probe by digesting it to release the fluorescent reporter molecule for quantitative detection of its now unquenched signal using a real-time fluorescent detection system. Typical reagents (e.g., as might be found in a typical QM™-based kit) for QM™ analysis may include, but are not limited to: PCR primers for specific gene (or bisulfite treated DNA sequence or CpG island); TaqMan® or Lightcycler® probes; optimized PCR buffers and deoxynucleotides; and Taq polymerase.

[0094] Ms-SNuPE. The Ms-SNuPE™ technique is a quantitative method for assessing methylation differences at specific CpG sites based on bisulfite treatment of DNA, followed by single-nucleotide primer extension (Gonzalgo and Jones, Nucleic Acids Res. 25:2529-2531, 1997). Briefly, genomic DNA is reacted with sodium bisulfite to convert unmethylated cytosine to uracil while leaving 5-methylcytosine unchanged. Amplification of the desired target sequence is then performed using PCR primers specific for bisulfite-converted DNA, and the resulting product is isolated and used as a template for methylation analysis at the CpG site(s) of interest. Small amounts of DNA can be analyzed (e.g., micro-dissected pathology sections), and it avoids utilization of restriction enzymes for determining the methylation status at CpG sites.

[0095] Typical reagents (e.g., as might be found in a typical Ms-SNuPE™-based kit) for Ms-SNuPE™ analysis may include, but are not limited to: PCR primers for specific gene (or bisulfite treated DNA sequence or CpG island); optimized PCR buffers and deoxynucleotides; gel extraction kit; positive control primers; Ms-SNuPE™ primers for specific gene; reaction buffer (for the Ms-SNuPE reaction); and labelled nucleotides. Additionally, bisulfite conversion reagents may include: DNA denaturation buffer; sulfonation buffer; DNA recovery regents or kit (e.g., precipitation, ultrafiltration, affinity column); desulfonation buffer; and DNA recovery components.

[0096] The genomic sequence according to SEQ ID NO: 1 to SEQ ID NO: 2, and non-naturally occurring treated variants thereof according to SEQ ID NO: 3 to SEQ ID NO: 10, were determined to have novel utility for the detection of malignant or pre-malignant colorectal adenomas and the differentiation of benign colorectal lesions from those undergoing malignant transformation and accordingly to be of use in the early detection of colorectal carcinomas.

[0097] In one embodiment the invention of the method comprises the following steps: i) contacting genomic DNA (preferably isolated from body fluids) obtained from the subject with at least one reagent, or series of reagents that distinguishes between methylated and non-methylated CpG dinucleotides within at least one gene or genomic sequence selected from the group consisting of Septin 9 (including all transcript variants thereof) and ALX4 (including their promoter and regulatory regions); and ii) determining the presence or absence of pre-cancerous (i.e. malignant or pre-malignant) colon cellular proliferative disorders or distinguishing between or among benign and pre-cancerous colon cellular proliferative disorders. Preferably the methylation status of both Septin 9 (including any transcript variants thereof) and ALX4 are analyzed.

[0098] Genomic DNA may be isolated by any means standard in the art, including the use of commercially available kits. Briefly, wherein the DNA of interest is encapsulated by a cellular membrane the biological sample must be disrupted and lysed by enzymatic, chemical or mechanical means. The DNA solution may then be cleared of proteins and other contaminants, e.g., by digestion with proteinase K. The genomic DNA is then recovered from the solution. This may be carried out by means of a variety of methods including salting out, organic extraction or binding of the DNA to a solid phase support. The choice of method will be affected by several factors including time, expense and required quantity of DNA. All clinical sample types comprising neoplastic matter are suitable for use in the present method, preferred are cell lines, histological slides, biopsies, paraffin-embedded tissue, body fluids, stool, colonic effluent, urine, blood plasma, blood serum, whole blood, isolated blood cells, cells isolated from the blood and combinations thereof. Body fluids are the preferred source of the DNA; particularly preferred are blood plasma, blood serum, whole blood, isolated blood cells and cells isolated from the blood.

[0099] The genomic DNA sample is then treated with at least one reagent, or series of reagents that distinguishes between methylated and non-methylated CpG dinucleotides within at least one target region of the genomic DNA, wherein the target region comprises, or hybridizes under stringent conditions to a sequence of at least 16 contiguous nucleotides of at least one sequence selected from the group consisting of SEQ ID NO: 1 TO SEQ ID NO: 2 respectively, wherein said contiguous nucleotides comprise at least one CpG dinucleotide sequence.

[0100] It is particularly preferred that said reagent converts cytosine bases which are unmethylated at the 5′-position to uracil, thymine, or another base which is dissimilar to cytosine in terms of hybridization behavior. However in an alternative embodiment said reagent may be a methylation sensitive restriction enzyme.

[0101] Wherein the genomic DNA sample is treated in such a manner that cytosine bases which are unmethylated at the 5′-position are converted to uracil, thymine, or another base which is dissimilar to cytosine in terms of hybridization behavior It is preferred that this treatment is carried out with bisulfite (hydrogen sulfite, disulfite) and subsequent alkaline hydrolysis. Such a treatment results in the conversion of SEQ ID NO: 1 TO SEQ ID NO: 2 to SEQ ID NO: 3-6, (respectively) wherein said CpG dinucleotides are methylated or SEQ ID NO: 7-10 wherein said CpG dinucleotides are unmethylated.

[0102] The treated DNA is then analyzed in order to determine the methylation state of the target gene sequences (at least one gene or genomic sequence selected from the group consisting of SEQ ID NO: 1 to SEQ ID NO: 2). It is particularly preferred that the target region comprises, or hybridizes under stringent conditions to at least 16 contiguous nucleotides of at least one gene or genomic sequence selected from the group consisting of SEQ ID NO: 1 to SEQ ID NO: 2. It is preferred that the sequence of said genes according to SEQ ID NO: 1 to SEQ ID NO: 2 are analyzed. The method of analysis may be selected from those known in the art, including those listed herein. Particularly preferred are MethyLight™, MSP and the use of blocking oligonucleotides (HeavyMethyl™) as described herein. It is further preferred that any oligonucleotides used in such analysis (including primers, blocking oligonucleotides and detection probes) should be reverse complementary, identical, or hybridize under stringent or highly stringent conditions to an at least 16-base-pair long segment of the base sequences of one or more of SEQ ID NO: 3 to SEQ ID NO: 10 and sequences complementary thereto.

[0103] Aberrant methylation, more specifically hypermethylation of the genes and genomic sequences thereof according to Table 1 selected from the group consisting of Septin 9 (including all transcript variants thereof) and/or ALX4 (including their promoter and/or regulatory regions) is associated with the presence of cancer. Preferably the methylation status of both Septin 9 (including any transcript variants thereof) and ALX4 are analyzed. Accordingly wherein a biological sample presents within any degree of methylation, said sample should be determined as having malignant potential.

[0104] The method of the invention may alternatively be enabled by means of any analysis of the expression of an RNA transcribed therefrom or polypeptide or protein translated from said RNA, preferably by means of mRNA expression analysis or polypeptide expression analysis. Accordingly the present invention also provides assays and methods, both quantitative and qualitative for detecting the expression of at least one gene or genomic sequence selected from the group consisting of Septin 9 (including all transcript variants thereof) and/or ALX4 in a subject and determining therefrom upon the presence or absence of a neoplastic colorectal cell proliferative disorder, or differentiating between a malignant or pre-malignant and benign colorectal cell proliferative disorder.

[0105] Aberrant expression of mRNA transcribed from the genes or genomic sequences selected from the group consisting of Septin 9 (including all transcript variants thereof) and/or ALX4 are associated with the malignant transformation of colorectal lesions. Preferably the expression of both Septin 9 (including any transcript variants thereof) and ALX4 are analyzed. According to the present invention, under expression (and/or methylation) is associated with the presence of malignant or pre-malignant colorectal cellular proliferative disorders, and over-expression (and/or absence of methylation) is associated with benign colorectal cellular proliferative disorders. It is particularly preferred that the expression of at least one of the transcript variants of the genes Septin 9 and ALX4 is determined.

[0106] To detect the presence of mRNA encoding a gene or genomic sequence, a sample is obtained from a patient. The sample may be any suitable sample comprising cellular matter of the lesion. Suitable sample types include cell lines, histological slides, biopsies, paraffin-embedded tissue, body fluids, stool, colonic effluent, blood plasma, blood serum, whole blood, isolated blood cells, cells isolated from the blood and all possible combinations thereof. It is preferred that said sample types are stool or body fluids selected from the group consisting colonic effluent, urine, blood plasma, blood serum, whole blood, isolated blood cells, cells isolated from the blood.

[0107] The sample may be treated to extract the RNA contained therein. The resulting nucleic acid from the sample is then analyzed. Many techniques are known in the state of the art for determining absolute and relative levels of gene expression, commonly used techniques suitable for use in the present invention include in situ hybridization (e.g., FISH), Northern analysis, RNase protection assays (RPA), microarrays and PCR-based techniques, such as quantitative PCR and differential display PCR or any other nucleic acid detection method.

[0108] Particularly preferred is the use of the reverse transcription/polymerization chain reaction technique (RT-PCR). The method of RT-PCR is well known in the art (for example, see Watson and Fleming, supra).

[0109] The RT-PCR method can be performed as follows. Total cellular RNA is isolated by, for example, the standard guanidium isothiocyanate method and the total RNA is reverse transcribed. The reverse transcription method involves synthesis of DNA on a template of RNA using a reverse transcriptase enzyme and a 3′ end oligonucleotide dT primer and/or random hexamer primers. The cDNA thus produced is then amplified by means of PCR. (Belyavsky et al, Nucl Acid Res 17:2919-2932, 1989; Krug and Berger, Methods in Enzymology, Academic Press, N.Y., Vol. 152, pp. 316-325, 1987 which are incorporated by reference). Further preferred is the “Real-time” variant of RT-PCR, wherein the PCR product is detected by means of hybridization probes (e.g. TaqMan, Lightcycler, Molecular Beacons and Scorpion) or SYBR green. The detected signal from the probes or SYBR green is then quantitated either by reference to a standard curve or by comparing the Ct values to that of a calibration standard. Analysis of housekeeping genes is often used to normalize the results.

[0110] In Northern blot analysis total or poly(A)+ mRNA is run on a denaturing agarose gel and detected by hybridisation to a labelled probe in the dried gel itself or on a membrane. The resulting signal is proportional to the amount of target RNA in the RNA population.

[0111] Comparing the signals from two or more cell populations or tissues reveals relative differences in gene expression levels. Absolute quantitation can be performed by comparing the signal to a standard curve generated using known amounts of an in vitro transcript corresponding to the target RNA. Analysis of housekeeping genes, genes whose expression levels are expected to remain relatively constant regardless of conditions, is often used to normalize the results, eliminating any apparent differences caused by unequal transfer of RNA to the membrane or unequal loading of RNA on the gel.

[0112] The first step in Northern analysis is isolating pure, intact RNA from the cells or tissue of interest. Because Northern blots distinguish RNAs by size, sample integrity influences the degree to which a signal is localized in a single band. Partially degraded RNA samples will result in the signal being smeared or distributed over several bands with an overall loss in sensitivity and possibly an erroneous interpretation of the data. In Northern blot analysis, DNA, RNA and oligonucleotide probes can be used and these probes are preferably labelled (e.g., radioactive labels, mass labels or fluorescent labels). The size of the target RNA, not the probe, will determine the size of the detected band, so methods such as random-primed labelling, which generates probes of variable lengths, are suitable for probe synthesis. The specific activity of the probe will determine the level of sensitivity, so it is preferred that probes with high specific activities, are used.

[0113] In an RNase protection assay, the RNA target and an RNA probe of a defined length are hybridised in solution. Following hybridisation, the RNA is digested with RNases specific for single-stranded nucleic acids to remove any unhybridized, single-stranded target RNA and probe. The RNases are inactivated, and the RNA is separated e.g. by denaturing polyacrylamide gel electrophoresis. The amount of intact RNA probe is proportional to the amount of target RNA in the RNA population. RPA can be used for relative and absolute quantitation of gene expression and also for mapping RNA structure, such as intron/exon boundaries and transcription start sites. The RNase protection assay is preferable to Northern blot analysis as it generally has a lower limit of detection.

[0114] The antisense RNA probes used in RPA are generated by in vitro transcription of a DNA template with a defined endpoint and are typically in the range of 50-600 nucleotides. The use of RNA probes that include additional sequences not homologous to the target RNA allows the protected fragment to be distinguished from the full-length probe. RNA probes are typically used instead of DNA probes due to the ease of generating single-stranded RNA probes and the reproducibility and reliability of RNA:RNA duplex digestion with RNases (Ausubel et al. 2003), particularly preferred are probes with high specific activities.

[0115] Particularly preferred is the use of microarrays. The microarray analysis process can be divided into two main parts. First is the immobilization of known gene sequences onto glass slides or other solid support followed by hybridisation of the fluorescently labelled cDNA (comprising the sequences to be interrogated) to the known genes immobilized on the glass slide (or other solid phase). After hybridisation, arrays are scanned using a fluorescent microarray scanner. Analysing the relative fluorescent intensity of different genes provides a measure of the differences in gene expression.

[0116] DNA arrays can be generated by immobilizing presynthesized oligonucleotides onto prepared glass slides or other solid surfaces. In this case, representative gene sequences are manufactured and prepared using standard oligonucleotide synthesis and purification methods. These synthesized gene sequences are complementary to the RNA transcript(s) of the genes of interest (in this case the genes or genomic sequences selected from the group consisting of Septin 9 (including all transcript variants thereof) and ALX4) and tend to be shorter sequences in the range of 25-70 nucleotides. In a preferred embodiment said oligonucleotides or polynucleotides comprise at least 9, 18 or 25 bases of a sequence complementary to or hybridising to at least the mRNA transcript and sequences complementary thereto. Alternatively, immobilized oligos can be chemically synthesized in situ on the surface of the slide. In situ oligonucleotide synthesis involves the consecutive addition of the appropriate nucleotides to the spots on the microarray; spots not receiving a nucleotide are protected during each stage of the process using physical or virtual masks. Preferably said synthesized nucleic acids are locked nucleic acids.

[0117] In expression profiling microarray experiments, the RNA templates used are representative of the transcription profile of the cells or tissues under study. RNA is first isolated from the cell populations or tissues to be compared. Each RNA sample is then used as a template to generate fluorescently labelled cDNA via a reverse transcription reaction. Fluorescent labelling of the cDNA can be accomplished by either direct labelling or indirect labelling methods. During direct labelling, fluorescently modified nucleotides (e.g., Cy®3- or Cy®5-dCTP) are incorporated directly into the cDNA during the reverse transcription. Alternatively, indirect labelling can be achieved by incorporating aminoallyl-modified nucleotides during cDNA synthesis and then conjugating an N-hydroxysuccinimide (NHS)-ester dye to the aminoallyl-modified cDNA after the reverse transcription reaction is complete. Alternatively, the probe may be unlabelled, but may be detectable by specific binding with a ligand which is labelled, either directly or indirectly. Suitable labels and methods for labelling ligands (and probes) are known in the art, and include, for example, radioactive labels which may be incorporated by known methods (e.g., nick translation or kinasing). Other suitable labels include but are not limited to biotin, fluorescent groups, chemiluminescent groups (e.g., dioxetanes, particularly triggered dioxetanes), enzymes, antibodies, and the like.

[0118] To perform differential gene expression analysis, cDNA generated from different RNA samples are labelled with Cy®3. The resulting labelled cDNA is purified to remove unincorporated nucleotides, free dye and residual RNA. Following purification, the labelled cDNA samples are hybridised to the microarray. The stringency of hybridisation is determined by a number of factors during hybridisation and during the washing procedure, including temperature, ionic strength, length of time and concentration of formamide. These factors are outlined in, for example, Sambrook et al. (Molecular Cloning: A Laboratory Manual, 2nd ed., 1989). The microarray is scanned post-hybridisation using a fluorescent microarray scanner. The fluorescent intensity of each spot indicates the level of expression of the analysed gene; bright spots correspond to strongly expressed genes, while dim spots indicate weak expression.

[0119] Once the images are obtained, the raw data must be analysed. First, the background fluorescence must be subtracted from the fluorescence of each spot. The data is then normalized to a control sequence, such as exogenously added nucleic acids (preferably RNA or DNA), or a housekeeping gene panel to account for any non-specific hybridisation, array imperfections or variability in the array set-up, cDNA labelling, hybridisation or washing. Data normalization allows the results of multiple arrays to be compared.

[0120] Another aspect of the invention relates to a kit for use in the detection of pre-cancerous colorectal cellular proliferative disorders or the differentiation between malignant/pre-malignant and benign colorectal lesions in a subject according to the methods of the present invention, said kit comprising: a means for measuring the level of transcription of genes or genomic sequences selected from the group consisting of Septin 9 (including all transcript variants thereof) and ALX4. In a preferred embodiment the means for measuring the level of transcription comprise oligonucleotides or polynucleotides able to hybridise under stringent or moderately stringent conditions to the transcription products of a gene or genomic sequence selected from the group consisting of Septin 9 (including all transcript variants thereof) and ALX4. Preferably said oligonucleotides or polynucleotides are able to hybridise under stringent or moderately stringent conditions to at least one of the transcription products of a gene or genomic sequence selected from the group consisting of Septin 9 (including all transcript variants thereof) and/or ALX4. In one embodiment said oligonucleotides or polynucleotides comprise at least 9, 18 or 25 bases of a sequence complementary to or hybridising to at least one of said sequence or sequences complementary thereto.

[0121] In a most preferred embodiment the level of transcription is determined by techniques selected from the group of Northern Blot analysis, reverse transcriptase PCR, real-time PCR, RNAse protection, and microarray. In another embodiment of the invention the kit further comprises means for obtaining a biological sample of the patient. Preferred is a kit, which further comprises a container which is most preferably suitable for containing the means for measuring the level of transcription and the biological sample of the patient, and most preferably further comprises instructions for use and interpretation of the kit results.

[0122] In a preferred embodiment the kit comprises (a) a plurality of oligonucleotides or polynucleotides able to hybridise under stringent or moderately stringent conditions to the transcription products of at least one gene or genomic sequence selected from the group consisting of Septin 9 (including all transcript variants thereof) and ALX4; (b) a container, preferably suitable for containing the oligonucleotides or polynucleotides and a biological sample of the patient comprising the transcription products wherein the oligonucleotides or polynucleotides can hybridise under stringent or moderately stringent conditions to the transcription products, (c) means to detect the hybridisation of (b); and optionally, (d) instructions for use and interpretation of the kit results. It is further preferred that said oligonucleotides or polynucleotides of (a) comprise in each case at least 9, 18 or 25 bases of a sequence complementary to or hybridising to the transcription products and sequences complementary thereto.

[0123] The kit may also contain other components such as hybridisation buffer (where the oligonucleotides are to be used as a probe) packaged in a separate container. Alternatively, where the oligonucleotides are to be used to amplify a target region, the kit may contain, packaged in separate containers, a polymerase and a reaction buffer optimised for primer extension mediated by the polymerase, such as PCR. Preferably said polymerase is a reverse transcriptase. It is further preferred that said kit further contains an Rnase reagent.

[0124] The present invention further provides for methods for the detection of the presence of the polypeptide encoded by said gene sequences in a sample obtained from a patient.

[0125] Aberrant levels of polypeptide expression of the polypeptides encoded by the genes or genomic sequences selected from the group consisting of Septin 9 (including all transcript variants thereof) and/or ALX4 are associated with the presence of colorectal cellular proliferative disorders. Furthermore said aberrant levels of expression are of use in the differentiation between benign and malignant/pre-malignant colorectal lesions. According to the present invention, under expression of said polypeptides is associated with the presence of colorectal lesions undergoing malignant transformation.

[0126] Any method known in the art for detecting polypeptides can be used. Such methods include, but are not limited to mass-spectrometry, immunodiffusion, immunoelectrophoresis, immunochemical methods, binder-ligand assays, immunohistochemical techniques, agglutination and complement assays (e.g., see Basic and Clinical Immunology, Sites and Terr, eds., Appleton and Lange, Norwalk, Conn. pp 217-262, 1991 which is incorporated by reference). Preferred are binder-ligand immunoassay methods including reacting antibodies with an epitope or epitopes and competitively displacing a labelled polypeptide or derivative thereof.

[0127] Certain embodiments of the present invention comprise the use of antibodies specific to the polypeptide encoded by a gene or genomic sequence selected from the group consisting of Septin 9 (including all transcript variants thereof) and ALX4.

[0128] Such antibodies are useful for the analysis of colorectal lesions. In certain embodiments production of monoclonal or polyclonal antibodies can be induced by the use of an epitope encoded by a polypeptide of the genes Septin 9 (including all transcript variants thereof) and/or ALX4 as an antigene. Such antibodies may in turn be used to detect expressed polypeptides as markers for the early detection of colorectal cancer. The levels of such polypeptides present may be quantified by conventional methods. Antibody-polypeptide binding may be detected and quantified by a variety of means known in the art, such as labelling with fluorescent or radioactive ligands. The invention further comprises kits for performing the above-mentioned procedures, wherein such kits contain antibodies specific for the investigated polypeptides.

[0129] Numerous competitive and non-competitive polypeptide binding immunoassays are well known in the art. Antibodies employed in such assays may be unlabelled, for example as used in agglutination tests, or labelled for use a wide variety of assay methods. Labels that can be used include radionuclides, enzymes, fluorescers, chemiluminescers, enzyme substrates or co-factors, enzyme inhibitors, particles, dyes and the like. Preferred assays include but are not limited to radioimmunoassay (RIA), enzyme immunoassays, e.g., enzyme-linked immunosorbent assay (ELISA), fluorescent immunoassays and the like. Polyclonal or monoclonal antibodies or epitopes thereof can be made for use in immunoassays by any of a number of methods known in the art.

[0130] In an alternative embodiment of the method the proteins may be detected by means of western blot analysis. Said analysis is standard in the art, briefly proteins are separated by means of electrophoresis, e.g., SDS-PAGE. The separated proteins are then transferred to a suitable membrane (or paper), e.g., nitrocellulose, retaining the spatial separation achieved by electrophoresis. The membrane is then incubated with a blocking agent to bind remaining sticky places on the membrane, commonly used agents include generic protein (e.g., milk protein). An antibody specific to the protein of interest is then added, said antibody being detectably labelled for example by dyes or enzymatic means (e.g., alkaline phosphatase or horseradish peroxidase). The location of the antibody on the membrane is then detected.

[0131] In an alternative embodiment of the method the proteins may be detected by means of immunohistochemistry (the use of antibodies to probe specific antigens in a sample). Said analysis is standard in the art, wherein detection of antigens in tissues is known as immunohistochemistry, while detection in cultured cells is generally termed immunocytochemistry. Briefly, the primary antibody to be detected by binding to its specific antigen. The antibody-antigen complex is then bound by a secondary enzyme conjugated antibody. In the presence of the necessary substrate and chromogen the bound enzyme is detected according to coloured deposits at the antibody-antigen binding sites. There is a wide range of suitable sample types, antigen-antibody affinity, antibody types, and detection enhancement methods. Thus optimal conditions for immunohistochemical or immunocytochemical detection must be determined by the person skilled in the art for each individual case.

[0132] One approach for preparing antibodies to a polypeptide is the selection and preparation of an amino acid sequence of all or part of the polypeptide, chemically synthesising the amino acid sequence and injecting it into an appropriate animal, usually a rabbit or a mouse (Milstein and Kohler Nature 256:495-497, 1975; Gulfre and Milstein, Methods in Enzymology: Immunochemical Techniques 73:1-46, Langone and Banatis eds., Academic Press, 1981 which are incorporated by reference in its entirety). Methods for preparation of the polypeptides or epitopes thereof include, but are not limited to chemical synthesis, recombinant DNA techniques or isolation from biological samples.

[0133] In the final step of the method the diagnosis of the patient is determined, whereby under-expression (of at least one gene or genomic sequence selected from the group consisting of Septin 9 (including all transcript variants thereof) and ALX4) is indicative of the presence of a colorectal lesion undergoing malignant transformation. Preferably the expression of both Septin 9 (including any transcript variants thereof) and ALX4 are analyzed. The term under-expression shall be taken to mean expression at a detected level less than a pre-determined cut off which may be selected from the group consisting of the mean, median or an optimised threshold value.

[0134] Another aspect of the invention provides a kit for use in the early detection of colorectal cancer and/or differentiation between malignant or pre-malignant and benign colorectal lesions in a subject according to the methods of the present invention, comprising: a means for detecting polypeptides at least one gene or genomic sequence selected from the group consisting of Septin 9 (including all transcript variants thereof) and ALX4. The means for detecting the polypeptides comprise preferably antibodies, antibody derivatives, or antibody fragments. The polypeptides are most preferably detected by means of Western Blotting utilizing a labelled antibody. In another embodiment of the invention the kit further comprising means for obtaining a biological sample of the patient. Preferred is a kit, which further comprises a container suitable for containing the means for detecting the polypeptides in the biological sample of the patient, and most preferably further comprises instructions for use and interpretation of the kit results. In a preferred embodiment the kit comprises: (a) a means for detecting polypeptides at least one gene or genomic sequence selected from the group consisting of Septin 9 (including all transcript variants thereof) and ALX4; (b) a container suitable for containing the said means and the biological sample of the patient comprising the polypeptides wherein the means can form complexes with the polypeptides; (c) a means to detect the complexes of (b); and optionally (d) instructions for use and interpretation of the kit results. The kit may also contain other components such as buffers or solutions suitable for blocking, washing or coating, packaged in a separate container.

[0135] Particular embodiments of the present invention provide a novel application of the analysis of methylation levels and/or patterns within said sequences that enables the early detection of colorectal cancers. Early detection of cancer is directly linked with disease prognosis, and the disclosed method thereby enables the physician and patient to make better and more informed treatment decisions.

[0136] Further Improvements

[0137] The present invention provides novel uses for the genomic sequence SEQ ID NO: 1 to SEQ ID NO: 2. Additional embodiments provide modified variants of SEQ ID NO: 1 to SEQ ID NO: 2, as well as oligonucleotides and/or PNA-oligomers for analysis of cytosine methylation patterns within SEQ ID NO: 1 to SEQ ID NO: 2.

[0138] An objective of the invention comprises analysis of the methylation state of one or more CpG dinucleotides within at least one sequence selected form the group consisting of SEQ ID NO: 1 to SEQ ID NO: 2 and sequences complementary thereto.

[0139] The disclosed invention provides treated nucleic acids, derived from genomic SEQ ID NO: 1 to SEQ ID NO: 2, wherein the treatment is suitable to convert at least one unmethylated cytosine base of the genomic DNA sequence to uracil or another base that is detectably dissimilar to cytosine in terms of hybridization. The genomic sequences in question may comprise one, or more consecutive methylated CpG positions. Said treatment preferably comprises use of a reagent selected from the group consisting of bisulfite, hydrogen sulfite, disulfite, and combinations thereof. In a preferred embodiment of the invention, the invention provides a non-naturally occurring modified nucleic acid comprising a sequence of at least 16 contiguous nucleotide bases in length of a sequence selected from the group consisting of SEQ ID NO: 3 to SEQ ID NO: 10. In further preferred embodiments of the invention said nucleic acid is at least 50, 100, 150, 200, 250 or 500 base pairs in length of a segment of the nucleic acid sequence disclosed in SEQ ID NO: 3 to SEQ ID NO: 10. Particularly preferred is a nucleic acid molecule that is not identical or complementary to all or a portion of the sequences SEQ ID NO: 1 to SEQ ID NO: 2 or other naturally occurring DNA.

[0140] It is preferred that said sequence comprises at least one CpG, TpA or CpA dinucleotide and sequences complementary thereto. The sequences of SEQ ID NO: 3 to SEQ ID NO: 10 provide non-naturally occurring modified versions of the nucleic acid according to SEQ ID NO: 1 to SEQ ID NO: 2, wherein the modification of each genomic sequence results in the synthesis of a nucleic acid having a sequence that is unique and distinct from said genomic sequence as follows. For each sense strand genomic DNA, e.g., SEQ ID NO:1, four converted versions are disclosed. A first version wherein “C” is converted to “T,” but “CpG” remains “CpG” (i.e., corresponds to case where, for the genomic sequence, all “C” residues of CpG dinucleotide sequences are methylated and are thus not converted); a second version discloses the complement of the disclosed genomic DNA sequence (i.e. antisense strand), wherein “C” is converted to “T,” but “CpG” remains “CpG” (i.e., corresponds to case where, for all “C” residues of CpG dinucleotide sequences are methylated and are thus not converted). The ‘upmethylated’ converted sequences of SEQ ID NO: 1 to SEQ ID NO: 2 correspond to SEQ ID NO: 3 to 6. A third chemically converted version of each genomic sequences is provided, wherein “C” is converted to “T” for all “C” residues, including those of “CpG” dinucleotide sequences (i.e., corresponds to case where, for the genomic sequences, all “C” residues of CpG dinucleotide sequences are unmethylated); a final chemically converted version of each sequence, discloses the complement of the disclosed genomic DNA sequence (i.e. antisense strand), wherein “C” is converted to “T” for all “C” residues, including those of “CpG” dinucleotide sequences (i.e., corresponds to case where, for the complement (antisense strand) of each genomic sequence, all “C” residues of CpG dinucleotide sequences are unmethylated). The ‘downmethylated’ converted sequences of SEQ ID NO: 1 to SEQ ID NO: 2 correspond to SEQ ID NO: 7 to 10.

[0141] Significantly, heretofore, the nucleic acid sequences and molecules according SEQ ID NO: 3 to SEQ ID NO: 10 were not implicated in or connected with the detection, classification or treatment of cellular proliferative disorders.

[0142] In an alternative preferred embodiment, the invention further provides oligonucleotides or oligomers suitable for use in the methods of the invention for detecting the cytosine methylation state within genomic or treated (chemically modified) DNA, according to SEQ ID NO: 1 to SEQ ID NO: 2, SEQ ID NO: 3 to SEQ ID NO: 10. Said oligonucleotide or oligomer nucleic acids provide novel diagnostic means. Said oligonucleotide or oligomer comprising a nucleic acid sequence having a length of at least nine (9) nucleotides which is identical to, hybridizes, under moderately stringent or stringent conditions (as defined herein above), to a treated nucleic acid sequence according to SEQ ID NO: 3 to SEQ ID NO: 10 and/or sequences complementary thereto, or to a genomic sequence according to SEQ ID NO: 1 to SEQ ID NO: 2, and/or sequences complementary thereto.

[0143] Thus, the present invention includes nucleic acid molecules (e.g., oligonucleotides and peptide nucleic acid (PNA) molecules (PNA-oligomers)) that hybridize under moderately stringent and/or stringent hybridization conditions to all or a portion of a sequence selected form the group consisting of SEQ ID NO: 1 to SEQ ID NO: 2, SEQ ID NO: 3 to SEQ ID NO: 10 or to the complements thereof. Particularly preferred is a nucleic acid molecule that hybridizes under moderately stringent and/or stringent hybridization conditions to all or a portion of the sequences SEQ ID NO: 3 to SEQ ID NO: 10 but not SEQ ID NO: 1 to SEQ ID NO: 2 or other human genomic DNA.

[0144] The identical or hybridizing portion of the hybridizing nucleic acids is typically at least 9, 16, 20, 25, 30 or 35 nucleotides in length. However, longer molecules have inventive utility, and are thus within the scope of the present invention.

[0145] Preferably, the hybridizing portion of the inventive hybridizing nucleic acids is at least 95%, or at least 98%, or 100% identical to the sequence, or to a portion thereof of a sequence selected from the group consisting of SEQ ID NO: 1 to SEQ ID NO: 2, SEQ ID NO: 3 to SEQ ID NO: 10, or to the complements thereof.

[0146] Hybridizing nucleic acids of the type described herein can be used, for example, as a primer (e.g., a PCR primer), or a diagnostic and/or prognostic probe or primer. Preferably, hybridization of the oligonucleotide probe to a nucleic acid sample is performed under stringent conditions and the probe is 100% identical to the target sequence. Nucleic acid duplex or hybrid stability is expressed as the melting temperature or Tm, which is the temperature at which a probe dissociates from a target DNA. This melting temperature is used to define the required stringency conditions.

[0147] For target sequences that are related and substantially identical to the corresponding sequence of SEQ ID NO: 1 to SEQ ID NO: 2 (such as allelic variants and SNPs), rather than identical, it is useful to first establish the lowest temperature at which only homologous hybridization occurs with a particular concentration of salt (e.g., SSC or SSPE). Then, assuming that 1% mismatching results in a 1° C. decrease in the Tm, the temperature of the final wash in the hybridization reaction is reduced accordingly (for example, if sequences having >95% identity with the probe are sought, the final wash temperature is decreased by 5° C.). In practice, the change in Tm can be between 0.5° C. and 1.5° C. per 1% mismatch.

[0148] Examples of inventive oligonucleotides of length X (in nucleotides), as indicated by polynucleotide positions with reference to, e.g., SEQ ID NO:1, include those corresponding to sets (sense and antisense sets) of consecutively overlapping oligonucleotides of length X, where the oligonucleotides within each consecutively overlapping set (corresponding to a given X value) are defined as the finite set of Z oligonucleotides from nucleotide positions:

[0149] n to (n+(X−1));

[0150] where n=1, 2, 3, . . . (Y−(X−1));

[0151] where Y equals the length (nucleotides or base pairs) of SEQ ID NO: 1 (52626);

[0152] where X equals the common length (in nucleotides) of each oligonucleotide in the set (e.g., X=20 for a set of consecutively overlapping 20-mers); and

[0153] where the number (Z) of consecutively overlapping oligomers of length X for a given SEQ ID NO of length Y is equal to Y−(X−1). For example Z=52626-19=52607 for either sense or antisense sets of SEQ ID NO:1, where X=20.

[0154] Preferably, the set is limited to those oligomers that comprise at least one CpG, TpG or CpA dinucleotide. Examples of inventive 20-mer oligonucleotides include the following set of oligomers (and the antisense set complementary thereto), indicated by polynucleotide positions with reference to SEQ ID NO:1:

[0155] 1-20, 2-21, 3-22, 4-23, 5-24 . . . and 52607-52626.

[0156] Preferably, the set is limited to those oligomers that comprise at least one CpG, TpG or CpA dinucleotide.

[0157] Likewise, examples of inventive 25-mer oligonucleotides include the following set of 219885 oligomers (and the antisense set complementary thereto), indicated by polynucleotide positions with reference to SEQ ID NO: 1:

[0158] 1-25, 2-26, 3-27, 4-28, 5-29 . . . and 52602-52626.

[0159] Preferably, the set is limited to those oligomers that comprise at least one CpG, TpG or CpA dinucleotide.

[0160] The present invention encompasses, for each of SEQ ID NO: 3 to SEQ ID NO: 10, SEQ ID NO: 1 to SEQ ID NO: 2 (sense and antisense), multiple consecutively overlapping sets of oligonucleotides or modified oligonucleotides of length X, where, e.g., X=9, 10, 17, 20, 22, 23, 25, 27, 30 or 35 nucleotides.

[0161] The oligonucleotides or oligomers according to the present invention constitute effective tools useful to ascertain genetic and epigenetic parameters of the genomic sequences selected from the group consisting of SEQ ID NO: 1 to SEQ ID NO: 2. Preferred sets of such oligonucleotides or modified oligonucleotides of length X are those consecutively overlapping sets of oligomers corresponding to SEQ ID NO: 1 to SEQ ID NO: 2, SEQ ID NO: 3 to SEQ ID NO: 10 (and to the complements thereof). Preferably, said oligomers comprise at least one CpG, TpG or CpA dinucleotide.

[0162] Particularly preferred oligonucleotides or oligomers according to the present invention are those in which the cytosine of the CpG dinucleotide (or of the corresponding converted TpG or CpA dinculeotide) sequences is within the middle third of the oligonucleotide; that is, where the oligonucleotide is, for example, 13 bases in length, the CpG, TpG or CpA dinucleotide is positioned within the fifth to ninth nucleotide from the 5′-end.

[0163] The oligonucleotides of the invention can also be modified by chemically linking the oligonucleotide to one or more moieties or conjugates to enhance the activity, stability or detection of the oligonucleotide. Such moieties or conjugates include chromophores, fluorophors, lipids such as cholesterol, cholic acid, thioether, aliphatic chains, phospholipids, polyamines, polyethylene glycol (PEG), palmityl moieties, and others as disclosed in, for example, U.S. Pat. Nos. 5,514,758, 5,565,552, 5,567,810, 5,574,142, 5,585,481, 5,587,371, 5,597,696 and 5,958,773. The probes may also exist in the form of a PNA (peptide nucleic acid) which has particularly preferred pairing properties. Thus, the oligonucleotide may include other appended groups such as peptides, and may include hybridization-triggered cleavage agents (Krol et al., BioTechniques 6:958-976, 1988) or intercalating agents (Zon, Pharm. Res. 5:539-549, 1988). To this end, the oligonucleotide may be conjugated to another molecule, e.g., a chromophore, fluorophor, peptide, hybridization-triggered cross-linking agent, transport agent, hybridization-triggered cleavage agent, etc.

[0164] The oligonucleotide may also comprise at least one art-recognized modified sugar and/or base moiety, or may comprise a modified backbone or non-natural internucleoside linkage.

[0165] The oligonucleotides or oligomers according to particular embodiments of the present invention are typically used in ‘sets,’ which contain at least one oligomer for analysis of each of the CpG dinucleotides of a genomic sequence selected from the group consisting SEQ ID NO: 1 to SEQ ID NO: 2 and sequences complementary thereto, or to the corresponding CpG, TpG or CpA dinucleotide within a sequence of the treated nucleic acids according to SEQ ID NO: 3 to SEQ ID NO: 10 and sequences complementary thereto. However, it is anticipated that for economic or other factors it may be preferable to analyse a limited selection of the CpG dinucleotides within said sequences, and the content of the set of oligonucleotides is altered accordingly.

[0166] Therefore, in particular embodiments, the present invention provides a set of at least two (2) (oligonucleotides and/or PNA-oligomers) useful for detecting the cytosine methylation state in treated genomic DNA (SEQ ID NO: 3 to SEQ ID NO: 10), or in genomic DNA (SEQ ID NO: 1 to SEQ ID NO: 2 and sequences complementary thereto). These probes enable the differentiation of pre-cancerous (i.e. malignant or pre-malignant) colorectal lesions from benign colorectal lesions (commonly referred to as benign). The set of oligomers may also be used for detecting single nucleotide polymorphisms (SNPs) in treated genomic DNA (SEQ ID NO: 3 to SEQ ID NO: 10), or in genomic DNA (SEQ ID NO: 1 to SEQ ID NO: 2 and sequences complementary thereto).

[0167] In preferred embodiments, at least one, and more preferably all members of a set of oligonucleotides is bound to a solid phase.

[0168] In further embodiments, the present invention provides a set of at least two (2) oligonucleotides that are used as ‘primer’ oligonucleotides for amplifying DNA sequences of one of SEQ ID NO: 1 to SEQ ID NO: 2, SEQ ID NO: 3 to SEQ ID NO: 10 and sequences complementary thereto, or segments thereof.

[0169] It is anticipated that the oligonucleotides may constitute all or part of an “array” or “DNA chip” (i.e., an arrangement of different oligonucleotides and/or PNA-oligomers bound to a solid phase). Such an array of different oligonucleotide- and/or PNA-oligomer sequences can be characterized, for example, in that it is arranged on the solid phase in the form of a rectangular or hexagonal lattice. The solid-phase surface may be composed of silicon, glass, polystyrene, aluminium, steel, iron, copper, nickel, silver, or gold. Nitrocellulose as well as plastics such as nylon, which can exist in the form of pellets or also as resin matrices, may also be used. An overview of the Prior Art in oligomer array manufacturing can be gathered from a special edition of Nature Genetics (Nature Genetics Supplement, Volume 21, January 1999, and from the literature cited therein). Fluorescently labelled probes are often used for the scanning of immobilized DNA arrays. The simple attachment of Cy3 and Cy5 dyes to the 5′-OH of the specific probe are particularly suitable for fluorescence labels. The detection of the fluorescence of the hybridised probes may be carried out, for example, via a confocal microscope. Cy3 and Cy5 dyes, besides many others, are commercially available.

[0170] It is also anticipated that the oligonucleotides, or particular sequences thereof, may constitute all or part of an “virtual array” wherein the oligonucleotides, or particular sequences thereof, are used, for example, as ‘specifiers’ as part of, or in combination with a diverse population of unique labeled probes to analyze a complex mixture of analytes. Such a method, for example is described in US 2003/0013091 (U.S. Ser. No. 09/898,743, published 16 Jan. 2003). In such methods, enough labels are generated so that each nucleic acid in the complex mixture (i.e., each analyte) can be uniquely bound by a unique label and thus detected (each label is directly counted, resulting in a digital read-out of each molecular species in the mixture).

[0171] It is particularly preferred that the oligomers according to the invention are utilized for the early detection of colorectal cancer by differentiating benign colorectal lesions from those undergoing malignant transformation.

[0172] In the most preferred embodiment of the method, the presence or absence of a colon lesion undergoing malignant transformation is determined and/or the differentiation between malignant/pre-malignant and benign lesions is made. This is achieved by analysis of the methylation status of at least one target sequence comprising at least one CpG position said sequence comprising, or hybridizing under stringent conditions to at least 16 contiguous nucleotides of a sequence selected from the group consisting SEQ ID NO: 1 to SEQ ID NO: 2 and complements thereof. The present invention further provides a method for ascertaining genetic and/or epigenetic parameters of the genomic sequence according to SEQ ID NO: 1 to SEQ ID NO: 2 within a subject by analyzing cytosine methylation and single nucleotide polymorphisms. Said method comprising contacting a nucleic acid comprising SEQ ID NO: 1 to SEQ ID NO: 2 in a biological sample obtained from said subject with at least one reagent or a series of reagents, wherein said reagent or series of reagents, distinguishes between methylated and non-methylated CpG dinucleotides within the target nucleic acid.

[0173] In a preferred embodiment, said method comprises the following steps: In the first step, a sample of the tissue to be analyzed is obtained. The source may be any suitable source, such as cell lines, histological slides, biopsies, paraffin-embedded tissue, body fluids, stool, colonic effluent, urine, blood plasma, blood serum, whole blood, isolated blood cells, cells isolated from the blood and all possible combinations thereof. It is preferred that said sources of DNA are stool or body fluids selected from the group consisting colonic effluent, blood plasma, blood serum, whole blood, isolated blood cells, cells isolated from the blood.

[0174] The genomic DNA is then isolated from the sample. Genomic DNA may be isolated by any means standard in the art, including the use of commercially available kits. Briefly, wherein the DNA of interest is encapsulated in by a cellular membrane the biological sample must be disrupted and lysed by enzymatic, chemical or mechanical means. The DNA solution may then be cleared of proteins and other contaminants e.g. by digestion with proteinase K. The genomic DNA is then recovered from the solution. This may be carried out by means of a variety of methods including salting out, organic extraction or binding of the DNA to a solid phase support. The choice of method will be affected by several factors including time, expense and required quantity of DNA.

[0175] Wherein the sample DNA is not enclosed in a membrane (e.g. circulating DNA from a blood sample) methods standard in the art for the isolation and/or purification of DNA may be employed. Such methods include the use of a protein degenerating reagent e.g., chaotropic salt e.g. guanidine hydrochloride or urea; or a detergent e.g. sodium dodecyl sulphate (SDS), cyanogen bromide. Alternative methods include but are not limited to ethanol precipitation or propanol precipitation, vacuum concentration amongst others by means of a centrifuge. The person skilled in the art may also make use of devices such as filter devices, e.g., ultrafiltration, silica surfaces or membranes, magnetic particles, polystyrene particles, polystyrene surfaces, positively charged surfaces, and positively charged membranes, charged membranes, charged surfaces, charged switch membranes, charged switched surfaces.

[0176] Once the nucleic acids have been extracted, the genomic double stranded DNA is used in the analysis.

[0177] In the second step of the method, the genomic DNA sample is treated in such a manner that cytosine bases which are unmethylated at the 5′-position are converted to uracil, thymine, or another base which is dissimilar to cytosine in terms of hybridization behavior. This will be understood as ‘pre-treatment’ or ‘treatment’ hereinafter.

[0178] This is preferably achieved by means of treatment with a bisulfite reagent. The term “bisulfite reagent” refers to a reagent comprising bisulfite, disulfite, hydrogen sulfite or combinations thereof, useful as disclosed herein to distinguish between methylated and unmethylated CpG dinucleotide sequences. Methods of said treatment are known in the art (e.g., PCT/EP2004/011715, which is incorporated by reference in its entirety). It is preferred that the bisulfite treatment is conducted in the presence of denaturing solvents such as but not limited to n-alkylenglycol, particularly diethylene glycol dimethyl ether (DME), or in the presence of dioxane or dioxane derivatives. In a preferred embodiment the denaturing solvents are used in concentrations between 1% and 35% (v/v). It is also preferred that the bisulfite reaction is carried out in the presence of scavengers such as but not limited to chromane derivatives, e.g., 6-hydroxy-2,5,7,8,-tetramethylchromane 2-carboxylic acid or trihydroxybenzoe acid and derivates thereof, e.g., Gallic acid (see: PCT/EP2004/011715 which is incorporated by reference in its entirety). The bisulfite conversion is preferably carried out at a reaction temperature between 30° C. and 70° C., whereby the temperature is increased to over 85° C. for short periods of times during the reaction (see: PCT/EP2004/011715 which is incorporated by reference in its entirety). The bisulfite treated DNA is preferably purified priori to the quantification. This may be conducted by any means known in the art, such as but not limited to ultrafiltration, preferably carried out by means of Microcon̂™ columns (manufactured by Milliporê™). The purification is carried out according to a modified manufacturer's protocol (see: PCT/EP2004/011715 which is incorporated by reference in its entirety).

[0179] In the third step of the method, fragments of the treated DNA are amplified, using sets of primer oligonucleotides according to the present invention, and an amplification enzyme. The amplification of several DNA segments can be carried out simultaneously in one and the same reaction vessel. Typically, the amplification is carried out using a polymerase chain reaction (PCR). Preferably said amplificates are 100 to 2,000 base pairs in length. The set of primer oligonucleotides includes at least two oligonucleotides whose sequences are each reverse complementary, identical, or hybridise under stringent or highly stringent conditions to an at least 16-base-pair long segment of the base sequences of one of SEQ ID NO: 3 TO SEQ ID NO: 10 and sequences complementary thereto.

[0180] In an alternate embodiment of the method, the methylation status of pre-selected CpG positions within at least one nucleic acid sequences selected from the group consisting SEQ ID NO: 1 TO SEQ ID NO: 2 may be detected by use of methylation-specific primer oligonucleotides. This technique (MSP) has been described in U.S. Pat. No. 6,265,171 to Herman. The use of methylation status specific primers for the amplification of bisulfite treated DNA allows the differentiation between methylated and unmethylated nucleic acids. MSP primers pairs contain at least one primer which hybridizes to a bisulfite treated CpG dinucleotide. Therefore, the sequence of said primers comprises at least one CpG dinucleotide. MSP primers specific for non-methylated DNA contain a “T’ at the position of the C position in the CpG. Preferably, therefore, the base sequence of said primers is required to comprise a sequence having a length of at least 9 nucleotides which hybridizes to a treated nucleic acid sequence according to one of SEQ ID NO: 3 TO SEQ ID NO: 10 and sequences complementary thereto, wherein the base sequence of said oligomers comprises at least one CpG dinucleotide. A further preferred embodiment of the method comprises the use of blocker oligonucleotides (the HeavyMethyl™ assay). The use of such blocker oligonucleotides has been described by Yu et al., BioTechniques 23:714-720, 1997. Blocking probe oligonucleotides are hybridised to the bisulfite treated nucleic acid concurrently with the PCR primers. PCR amplification of the nucleic acid is terminated at the 5′ position of the blocking probe, such that amplification of a nucleic acid is suppressed where the complementary sequence to the blocking probe is present. The probes may be designed to hybridize to the bisulfite treated nucleic acid in a methylation status specific manner. For example, for detection of methylated nucleic acids within a population of unmethylated nucleic acids, suppression of the amplification of nucleic acids which are unmethylated at the position in question would be carried out by the use of blocking probes comprising a ‘CpA’ or ‘TpA’ at the position in question, as opposed to a ‘CpG’ if the suppression of amplification of methylated nucleic acids is desired.

[0181] For PCR methods using blocker oligonucleotides, efficient disruption of polymerase-mediated amplification requires that blocker oligonucleotides not be elongated by the polymerase. Preferably, this is achieved through the use of blockers that are 3′-deoxyoligonucleotides, or oligonucleotides derivitized at the 3′ position with other than a “free” hydroxyl group. For example, 3′-O-acetyl oligonucleotides are representative of a preferred class of blocker molecule.

[0182] Additionally, polymerase-mediated decomposition of the blocker oligonucleotides should be precluded. Preferably, such preclusion comprises either use of a polymerase lacking 5′-3′ exonuclease activity, or use of modified blocker oligonucleotides having, for example, thioate bridges at the 5′-terminii thereof that render the blocker molecule nuclease-resistant. Particular applications may not require such 5′ modifications of the blocker. For example, if the blocker- and primer-binding sites overlap, thereby precluding binding of the primer (e.g., with excess blocker), degradation of the blocker oligonucleotide will be substantially precluded. This is because the polymerase will not extend the primer toward, and through (in the 5′-3′ direction) the blocker—a process that normally results in degradation of the hybridized blocker oligonucleotide.

[0183] A particularly preferred blocker/PCR embodiment, for purposes of the present invention and as implemented herein, comprises the use of peptide nucleic acid (PNA) oligomers as blocking oligonucleotides. Such PNA blocker oligomers are ideally suited, because they are neither decomposed nor extended by the polymerase.

[0184] Preferably, therefore, the base sequence of said blocking oligonucleotides is required to comprise a sequence having a length of at least 9 nucleotides which hybridizes to a treated nucleic acid sequence according to one of SEQ ID NO: 3 to SEQ ID NO: 10 and sequences complementary thereto, wherein the base sequence of said oligonucleotides comprises at least one CpG, TpG or CpA dinucleotide.

[0185] The fragments obtained by means of the amplification can carry a directly or indirectly detectable label. Preferred are labels in the form of fluorescence labels, radionuclides, or detachable molecule fragments having a typical mass which can be detected in a mass spectrometer. Where said labels are mass labels, it is preferred that the labeled amplificates have a single positive or negative net charge, allowing for better delectability in the mass spectrometer. The detection may be carried out and visualized by means of, e.g., matrix assisted laser desorption/ionization mass spectrometry (MALDI) or using electron spray mass spectrometry (ESI).

[0186] Matrix Assisted Laser Desorption/Ionization Mass Spectrometry (MALDI-TOF) is a very efficient development for the analysis of biomolecules (Karas and Hillenkamp, Anal Chem., 60:2299-301, 1988). An analyte is embedded in a light-absorbing matrix. The matrix is evaporated by a short laser pulse thus transporting the analyte molecule into the vapor phase in an unfragmented manner. The analyte is ionized by collisions with matrix molecules. An applied voltage accelerates the ions into a field-free flight tube. Due to their different masses, the ions are accelerated at different rates. Smaller ions reach the detector sooner than bigger ones. MALDI-TOF spectrometry is well suited to the analysis of peptides and proteins. The analysis of nucleic acids is somewhat more difficult (Gut and Beck, Current Innovations and Future Trends, 1:147-57, 1995). The sensitivity with respect to nucleic acid analysis is approximately 100-times less than for peptides, and decreases disproportionally with increasing fragment size. Moreover, for nucleic acids having a multiply negatively charged backbone, the ionization process via the matrix is considerably less efficient. In MALDI-TOF spectrometry, the selection of the matrix plays an eminently important role. For desorption of peptides, several very efficient matrixes have been found which produce a very fine crystallization. There are now several responsive matrixes for DNA, however, the difference in sensitivity between peptides and nucleic acids has not been reduced. This difference in sensitivity can be reduced, however, by chemically modifying the DNA in such a manner that it becomes more similar to a peptide. For example, phosphorothioate nucleic acids, in which the usual phosphates of the backbone are substituted with thiophosphates, can be converted into a charge-neutral DNA using simple alkylation chemistry (Gut and Beck, Nucleic Acids Res. 23: 1367-73, 1995). The coupling of a charge tag to this modified DNA results in an increase in MALDI-TOF sensitivity to the same level as that found for peptides. A further advantage of charge tagging is the increased stability of the analysis against impurities, which makes the detection of unmodified substrates considerably more difficult.

[0187] In the fourth step of the method, the amplificates obtained during the third step of the method are analyzed in order to ascertain the methylation status of the CpG dinucleotides prior to the treatment.

[0188] In embodiments where the amplificates were obtained by means of MSP amplification, the presence or absence of an amplificate is in itself indicative of the methylation state of the CpG positions covered by the primer, according to the base sequences of said primer.

[0189] Amplificates obtained by means of both standard and methylation specific PCR may be further analyzed by means of based-based methods such as, but not limited to, array technology and probe based technologies as well as by means of techniques such as sequencing and template directed extension.

[0190] In one embodiment of the method, the amplificates synthesized in step three are subsequently hybridized to an array or a set of oligonucleotides and/or PNA probes. In this context, the hybridization takes place in the following manner: the set of probes used during the hybridization is preferably composed of at least 2 oligonucleotides or PNA-oligomers; in the process, the amplificates serve as probes which hybridize to oligonucleotides previously bonded to a solid phase; the non-hybridized fragments are subsequently removed; said oligonucleotides contain at least one base sequence having a length of at least 9 nucleotides which is reverse complementary or identical to a segment of the base sequences specified in the present Sequence Listing; and the segment comprises at least one CpG, TpG or CpA dinucleotide. The hybridizing portion of the hybridizing nucleic acids is typically at least 9, 15, 20, 25, 30 or 35 nucleotides in length. However, longer molecules have inventive utility, and are thus within the scope of the present invention.

[0191] In a preferred embodiment, said dinucleotide is present in the central third of the oligomer. For example, wherein the oligomer comprises one CpG dinucleotide, said dinucleotide is preferably the fifth to ninth nucleotide from the 5′-end of a 13-mer. One oligonucleotide exists for the analysis of each CpG dinucleotide within a sequence selected from the group consisting SEQ ID NO: 1 to SEQ ID NO: 2, and the equivalent positions within SEQ ID NO: 3 to SEQ ID NO: 10.

[0192] Said oligonucleotides may also be present in the form of peptide nucleic acids. The non-hybridized amplificates are then removed. The hybridized amplificates are then detected. In this context, it is preferred that labels attached to the amplificates are identifiable at each position of the solid phase at which an oligonucleotide sequence is located.

[0193] In yet a further embodiment of the method, the genomic methylation status of the CpG positions may be ascertained by means of oligonucleotide probes (as detailed above) that are hybridized to the bisulfite treated DNA concurrently with the PCR amplification primers (wherein said primers may either be methylation specific or standard).

[0194] A particularly preferred embodiment of this method is the use of fluorescence-based Real Time Quantitative PCR (Heid et al., Genome Res. 6:986-994, 1996; also see U.S. Pat. No. 6,331,393) employing a dual-labeled fluorescent oligonucleotide probe (TaqMan™ PCR, using an ABI Prism 7700 Sequence Detection System, Perkin Elmer Applied Biosystems, Foster City, Calif.). The TaqMan™ PCR reaction employs the use of a non-extendible interrogating oligonucleotide, called a TaqMan™ probe, which, in preferred embodiments, is designed to hybridize to a CpG-rich sequence located between the forward and reverse amplification primers. The TaqMan™ probe further comprises a fluorescent “reporter moiety” and a “quencher moiety” covalently bound to linker moieties (e.g., phosphoramidites) attached to the nucleotides of the TaqMan™ oligonucleotide. For analysis of methylation within nucleic acids subsequent to bisulfite treatment, it is required that the probe be methylation specific, as described in U.S. Pat. No. 6,331,393, (hereby incorporated by reference in its entirety) also known as the MethyLight™ assay. Variations on the TaqMan™ detection methodology that are also suitable for use with the described invention include the use of dual-probe technology (Lightcycler™) or fluorescent amplification primers (Sunrise™ technology). Both these techniques may be adapted in a manner suitable for use with bisulfite treated DNA, and moreover for methylation analysis within CpG dinucleotides.

[0195] In a further preferred embodiment of the method, the fourth step of the method comprises the use of template-directed oligonucleotide extension, such as MS-SNuPE as described by Gonzalgo and Jones, Nucleic Acids Res. 25:2529-2531, 1997.

[0196] In yet a further embodiment of the method, the fourth step of the method comprises sequencing and subsequent sequence analysis of the amplificate generated in the third step of the method (Sanger F., et al., Proc Natl Acad Sci USA 74:5463-5467, 1977).

[0197] Best Mode

[0198] In the most preferred embodiment of the method the genomic nucleic acids are isolated and treated according to the first three steps of the method outlined above, namely:

[0199] a) obtaining, from a subject, a biological sample having subject genomic DNA;

[0200] b) extracting or otherwise isolating the genomic DNA;

[0201] c) treating the genomic DNA of b), or a fragment thereof, with one or more reagents to convert cytosine bases that are unmethylated in the 5-position thereof to uracil or to another base that is detectably dissimilar to cytosine in terms of hybridization properties; and wherein

[0202] d) amplifying subsequent to treatment in c) is carried out in a methylation specific manner, namely by use of methylation specific primers or blocking oligonucleotides, and further wherein

[0203] e) detecting of the amplificates is carried out by means of a real-time detection probe, as described above.

[0204] Preferably, where the subsequent amplification of d) is carried out by means of methylation specific primers, as described above, said methylation specific primers comprise a sequence having a length of at least 9 nucleotides which hybridizes to a treated nucleic acid sequence according to one of SEQ ID NO: 3 to SEQ ID NO: 10 and sequences complementary thereto, wherein the base sequence of said oligomers comprise at least one CpG dinucleotide.

[0205] Step e) of the method, namely the detection of the specific amplificates indicative of the methylation status of one or more CpG positions of at least one sequences of the group comprising SEQ ID NO: 1 to SEQ ID NO: 2 is carried out by means of real-time detection methods as described above.

[0206] Additional embodiments of the invention provide a method for the analysis of the methylation status of genomic DNA according to the invention (SEQ ID NO: 1 to SEQ ID NO: 2, and complements thereof) without the need for bisulfite conversion. Methods are known in the art wherein a methylation sensitive restriction enzyme reagent, or a series of restriction enzyme reagents comprising methylation sensitive restriction enzyme reagents that distinguishes between methylated and non-methylated CpG dinucleotides within a target region are utilized in determining methylation, for example but not limited to DMH.

[0207] In the first step of such additional embodiments, the genomic DNA sample is isolated from tissue or cellular sources. Genomic DNA may be isolated by any means standard in the art, including the use of commercially available kits. Briefly, wherein the DNA of interest is encapsulated in by a cellular membrane the biological sample must be disrupted and lysed by enzymatic, chemical or mechanical means. The DNA solution may then be cleared of proteins and other contaminants, e.g., by digestion with proteinase K. The genomic DNA is then recovered from the solution. This may be carried out by means of a variety of methods including salting out, organic extraction or binding of the DNA to a solid phase support. The choice of method will be affected by several factors including time, expense and required quantity of DNA. All clinical sample types comprising neoplastic or potentially neoplastic matter are suitable for us e in the present method, preferred are cell lines, histological slides, biopsies, paraffin-embedded tissue, body fluids, stool, colonic effluent, urine, blood plasma, blood serum, whole blood, isolated blood cells, cells isolated from the blood and combinations thereof. Body fluids are the preferred source of the DNA; particularly preferred are blood plasma, blood serum, whole blood, isolated blood cells and cells isolated from the blood.

[0208] Once the nucleic acids have been extracted, the genomic double-stranded DNA is used in the analysis.

[0209] In a preferred embodiment, the DNA may be cleaved prior to treatment with methylation sensitive restriction enzymes. Such methods are known in the art and may include both physical and enzymatic means. Particularly preferred is the use of one or a plurality of restriction enzymes which are not methylation sensitive, and whose recognition sites are AT rich and do not comprise CG dinucleotides. The use of such enzymes enables the conservation of CpG islands and CpG rich regions in the fragmented DNA. The non-methylation-specific restriction enzymes are preferably selected from the group consisting of MseI, BfaI, Csp6I, Tru1I, Tvu1I, Tru9I, Tvu9I, MaeI and XspI. Particularly preferred is the use of two or three such enzymes. Particularly preferred is the use of a combination of MseI, BfaI and Csp6I.

[0210] The fragmented DNA may then be ligated to adaptor oligonucleotides in order to facilitate subsequent enzymatic amplification. The ligation of oligonucleotides to blunt and sticky ended DNA fragments is known in the art, and is carried out by means of dephosphorylation of the ends (e.g. using calf or shrimp alkaline phosphatase) and subsequent ligation using ligase enzymes (e.g. T4 DNA ligase) in the presence of dATPs. The adaptor oligonucleotides are typically at least 18 base pairs in length.

[0211] In the third step, the DNA (or fragments thereof) is then digested with one or more methylation sensitive restriction enzymes. The digestion is carried out such that hydrolysis of the DNA at the restriction site is informative of the methylation status of a specific CpG dinucleotide of at least one gene or genomic sequence selected from the group consisting of Septin 9 (including all transcript variants thereof) and ALX4. Preferably the methylation status of both Septin 9 (including any transcript variants thereof) and ALX4 are analyzed.

[0212] Preferably, the methylation-specific restriction enzyme is selected from the group consisting of Bsi E1, Hga I HinPl, Hpy99I, Ava I, Bce AI, Bsa HI, BisI, BstUI, BshI236I, AccII, BstFNI, McrBC, GlaI, MvnI, HpaII (HapII), HhaI, AciI, SmaI, HinP1I, HpyCH4IV, EagI and mixtures of two or more of the above enzymes. Preferred is a mixture containing the restriction enzymes BstUI, HpaII, HpyCH4IV and HinP1I.

[0213] In the fourth step, which is optional but a preferred embodiment, the restriction fragments are amplified. This is preferably carried out using a polymerase chain reaction, and said amplificates may carry suitable detectable labels as discussed above, namely fluorophore labels, radionuclides and mass labels. Particularly preferred is amplification by means of an amplification enzyme and at least two primers comprising, in each case a contiguous sequence at least 16 nucleotides in length that is complementary to, or hybridizes under moderately stringent or stringent conditions to a sequence selected from the group consisting SEQ ID NO: 1 TO SEQ ID NO: 2, and complements thereof. Preferably said contiguous sequence is at least 16, 20 or 25 nucleotides in length. In an alternative embodiment said primers may be complementary to any adaptors linked to the fragments.

[0214] In the fifth step the amplificates are detected. The detection may be by any means standard in the art, for example, but not limited to, gel electrophoresis analysis, hybridization analysis, incorporation of detectable tags within the PCR products, DNA array analysis, MALDI or ESI analysis. Preferably said detection is carried out by hybridization to at least one nucleic acid or peptide nucleic acid comprising in each case a contiguous sequence at least 16 nucleotides in length that is complementary to, or hybridizes under moderately stringent or stringent conditions to a sequence selected from the group consisting SEQ ID NO: 1 to SEQ ID NO: 2, and complements thereof. Preferably said contiguous sequence is at least 16, 20 or 25 nucleotides in length.

[0215] Subsequent to the determination of the methylation state or level of the genomic nucleic acids the class of cellular proliferative disorder (benign or malignant) is deduced based upon the methylation state or level of at least one CpG dinucleotide sequence of at least one sequence selected from the group consisting SEQ ID NO: 1 to SEQ ID NO: 2, or an average, or a value reflecting an average methylation state of a plurality of CpG dinucleotide sequences of at least one sequence selected from the group consisting SEQ ID NO: 1 to SEQ ID NO: 2 wherein methylation is associated with a colorectal lesion undergoing malignant transformation. Wherein said methylation is determined by quantitative means the cut-off point for determining said the presence of methylation is preferably zero (i.e. wherein a sample displays any degree of methylation it is determined as having a methylated status at the analyzed CpG position). Nonetheless, it is foreseen that the person skilled in the art may wish to adjust said cut-off value in order to provide an assay of a particularly preferred sensitivity or specificity. Accordingly said cut-off value may be increased (thus increasing the specificity), said cut off value may be within a range selected form the group consisting of 0%-5%, 5%-10%, 10%-15%, 15%-20%, 20%-30% and 30%-50%. Particularly preferred are the cut-offs 10%, 15%, 25%, and 30%.

[0216] Prognostic Assays for Cellular Proliferative Disorders

[0217] The present invention enables diagnosis of events which are disadvantageous to patients or individuals in which important genetic and/or epigenetic parameters within at least one gene or genomic sequence selected from the group consisting of Septin 9 (including all transcript variants thereof) and/or ALX4 may be used as markers. Said parameters obtained by means of the present invention may be compared to another set of genetic and/or epigenetic parameters, the differences serving as the basis for a diagnosis and/or prognosis of events which are disadvantageous to patients or individuals.

[0218] More specifically the present invention enables the screening of at-risk populations for the early detection of cancers, most preferably colorectal carcinomas. Furthermore, the present invention enables the differentiation of malignant or pre-malignant lesions from those which are likely to remain benign (i.e. non-cancerous).

[0219] Specifically, the present invention provides for colorectal neoplasm detection assays based on measurement of differential expression (preferably methylation) of one or more CpG dinucleotide sequences of at least one sequence selected from the group consisting SEQ ID NO: 1 to SEQ ID NO: 2 that comprise such a CpG dinucleotide sequence. Typically, such assays involve obtaining a sample from a subject, performing an assay to measure the expression of at least one gene or genomic sequence selected from the group consisting of Septin 9 (including all transcript variants thereof) and ALX4, preferably by determining the methylation status of at least one sequence selected from the group consisting SEQ ID NO: 1 to SEQ ID NO: 2, derived from the sample, relative to a control sample, or a known standard and making a diagnosis based thereon. It is particularly preferred that the methylation status of both Septin 9 (including any transcript variants thereof) and ALX4 are analyzed.

[0220] In particular preferred embodiments, inventive oligomers are used to assess the CpG dinucleotide methylation status, such as those based on SEQ ID NO: 1 to SEQ ID NO: 2, SEQ ID NO: 3 to SEQ ID NO: 10, or arrays thereof, as well as in kits based thereon and useful for the classification of colorectal cell proliferative disorders.

[0221] Kits

[0222] Moreover, an additional aspect of the present invention is a kit comprising: a means for determining methylation of at least one gene selected from the group consisting of Septin 9 (including all transcript variants thereof) and ALX4. The means for determining methylation comprise preferably a bisulfite-containing reagent; one or a plurality of oligonucleotides consisting whose sequences in each case are identical, are complementary, or hybridise under stringent or highly stringent conditions to a 9 or more preferably up to 18 base long segment of a sequence selected from SEQ ID NO: 3 to SEQ ID NO: 10; and optionally instructions for carrying out and evaluating the described method of methylation analysis. In one embodiment the base sequence of said oligonucleotides comprises at least one CpG, CpA or TpG dinucleotide.

[0223] In a further embodiment, said kit may further comprise standard reagents for performing a CpG position-specific methylation analysis, wherein said analysis comprises one or more of the following techniques: MS-SNuPE, MSP, MethyLight™, HeavyMethyl, COBRA, and nucleic acid sequencing. However, a kit along the lines of the present invention can also contain only part of the aforementioned components.

[0224] In a preferred embodiment the kit may comprise additional bisulfite conversion reagents selected from the group consisting: DNA denaturation buffer; sulfonation buffer; DNA recovery reagents or kits (e.g., precipitation, ultrafiltration, affinity column); desulfonation buffer; and DNA recovery components.

[0225] In a further alternative embodiment, the kit may contain, packaged in separate containers, a polymerase and a reaction buffer optimised for primer extension mediated by the polymerase, such as PCR. In another embodiment of the invention the kit further comprising means for obtaining a biological sample of the patient. Preferred is a kit, which further comprises a container suitable for containing the means for determining methylation of at least one gene or genomic sequence selected from the group consisting of Septin 9 (including all transcript variants thereof) and ALX4 in the biological sample of the patient, and most preferably further comprises instructions for use and interpretation of the kit results. In a preferred embodiment the kit comprises: (a) a bisulfite reagent; (b) a container suitable for containing the said bisulfite reagent and the biological sample of the patient; (c) at least one set of primer oligonucleotides containing two oligonucleotides whose sequences in each case are identical, are complementary, or hybridise under stringent or highly stringent conditions to a 9 or more preferably up to 18 base long segment of a sequence selected from SEQ ID NO: 3 to SEQ ID NO: 10; and optionally (d) instructions for use and interpretation of the kit results. In an alternative preferred embodiment the kit comprises: (a) a bisulfite reagent; (b) a container suitable for containing the said bisulfite reagent and the biological sample of the patient; (c) at least one oligonucleotides and/or PNA-oligomer having a length of at least 9 or 16 nucleotides which is identical to or hybridises to a pre-treated nucleic acid sequence according to one of SEQ ID NO: 3 to SEQ ID NO: 10 and sequences complementary thereto; and optionally (d) instructions for use and interpretation of the kit results.

[0226] In an alternative embodiment the kit comprises: (a) a bisulfite reagent; (b) a container suitable for containing the said bisulfite reagent and the biological sample of the patient; (c) at least one set of primer oligonucleotides containing two oligonucleotides whose sequences in each case are identical, are complementary, or hybridise under stringent or highly stringent conditions to a 9 or more preferably 18 base long segment of a sequence selected from SEQ ID NO: 3 to SEQ ID NO: 10; (d) at least one oligonucleotides and/or PNA-oligomer having a length of at least 9 or 16 nucleotides which is identical to or hybridises to a pre-treated nucleic acid sequence according to one of SEQ ID NO: 3 to SEQ ID NO: 10 and sequences complementary thereto; and optionally (e) instructions for use and interpretation of the kit results.

[0227] The kit may also contain other components such as buffers or solutions suitable for blocking, washing or coating, packaged in a separate container.

[0228] Typical reagents (e.g., as might be found in a typical COBRA™-based kit) for COBRA™ analysis may include, but are not limited to: PCR primers for at least one gene selected from the group consisting of Septin 9 (including all transcript variants thereof) and ALX4; restriction enzyme and appropriate buffer; gene-hybridization oligo; control hybridization oligo; kinase labeling kit for oligo probe; and labeled nucleotides. Typical reagents (e.g., as might be found in a typical MethyLight™-based kit) for MethyLight™ analysis may include, but are not limited to: PCR primers for the bisulfite converted sequence of at least one gene or genomic sequence selected from the group consisting of Septin 9 (including all transcript variants thereof) and ALX4; bisulfite specific probes (e.g., TaqMan™ or Lightcycler™); optimized PCR buffers and deoxynucleotides; and Taq polymerase.

[0229] Typical reagents (e.g., as might be found in a typical Ms-SNuPE™-based kit) for Ms-SNuPE™ analysis may include, but are not limited to: PCR primers for specific gene (or bisulfite treated DNA sequence or CpG island); optimized PCR buffers and deoxynucleotides; gel extraction kit; positive control primers; Ms-SNuPE™ primers for the bisulfite converted sequence of at least one gene or genomic sequence selected from the group consisting of Septin 9 (including all transcript variants thereof) and ALX4; reaction buffer (for the Ms-SNuPE reaction); and labeled nucleotides.

[0230] Typical reagents (e.g., as might be found in a typical MSP-based kit) for MSP analysis may include, but are not limited to: methylated and unmethylated PCR primers for the bisulfite converted sequence of or genomic sequence selected from the group consisting of Septin 9 (including all transcript variants thereof) and ALX4, optimized PCR buffers and deoxynucleotides, and specific probes.

[0231] Moreover, an additional aspect of the present invention is an alternative kit comprising a means for determining methylation of at least one gene or genomic sequence selected from the group consisting of Septin 9 (including all transcript variants thereof) and ALX4, wherein said means comprise preferably at least one methylation specific restriction enzyme; one or a plurality of primer oligonucleotides (preferably one or a plurality of primer pairs) suitable for the amplification of a sequence comprising at least one CpG dinucleotide of a sequence selected from SEQ ID NO: 1 to SEQ ID NO: 2; and optionally instructions for carrying out and evaluating the described method of methylation analysis. In one embodiment the base sequence of said oligonucleotides are identical, are complementary, or hybridise under stringent or highly stringent conditions to an at least 18 base long segment of a sequence selected from SEQ ID NO: 1 to SEQ ID NO: 2.

[0232] In a further embodiment said kit may comprise one or a plurality of oligonucleotide probes for the analysis of the digest fragments, preferably said oligonucleotides are identical, are complementary, or hybridise under stringent or highly stringent conditions to an at least 16 base long segment of a sequence selected from SEQ ID NO: 1 to SEQ ID NO: 2.

[0233] In a preferred embodiment the kit may comprise additional reagents selected from the group consisting: buffer (e.g., restriction enzyme, PCR, storage or washing buffers); DNA recovery reagents or kits (e.g., precipitation, ultrafiltration, affinity column) and DNA recovery components.

[0234] In a further alternative embodiment, the kit may contain, packaged in separate containers, a polymerase and a reaction buffer optimized for primer extension mediated by the polymerase, such as PCR. In another embodiment of the invention the kit further comprising means for obtaining a biological sample of the patient. In a preferred embodiment the kit comprises: (a) a methylation sensitive restriction enzyme reagent; (b) a container suitable for containing the said reagent and the biological sample of the patient; (c) at least one set of oligonucleotides one or a plurality of nucleic acids or peptide nucleic acids which are identical, are complementary, or hybridise under stringent or highly stringent conditions to an at least 9 base long segment of a sequence selected from SEQ ID NO: 1 to SEQ ID NO: 2; and optionally (d) instructions for use and interpretation of the kit results.

[0235] In an alternative preferred embodiment the kit comprises: (a) a methylation sensitive restriction enzyme reagent; (b) a container suitable for containing the said reagent and the biological sample of the patient; (c) at least one set of primer oligonucleotides suitable for the amplification of a sequence comprising at least one CpG dinucleotide of a sequence selected from SEQ ID NO: 1 to SEQ ID NO: 2; and optionally (d) instructions for use and interpretation of the kit results.

[0236] In an alternative embodiment the kit comprises: (a) a methylation sensitive restriction enzyme reagent; (b) a container suitable for containing the said reagent and the biological sample of the patient; (c) at least one set of primer oligonucleotides suitable for the amplification of a sequence comprising at least one CpG dinucleotide of a sequence selected from SEQ ID NO: 1 to SEQ ID NO: 2; (d) at least one set of oligonucleotides one or a plurality of nucleic acids or peptide nucleic acids which are identical, are complementary, or hybridize under stringent or highly stringent conditions to an at least 9 base long segment of a sequence selected from SEQ ID NO: 1 to SEQ ID NO: 2 and optionally (e) instructions for use and interpretation of the kit results.

[0237] The kit may also contain other components such as buffers or solutions suitable for blocking, washing or coating, packaged in a separate container.

[0238] The invention further relates to a kit for use in detecting and/or providing a classification of colorectal lesions in a subject by means of methylation-sensitive restriction enzyme analysis. Said kit comprises a container and a DNA microarray component. Said DNA microarray component being a surface upon which a plurality of oligonucleotides are immobilized at designated positions and wherein the oligonucleotide comprises at least one CpG methylation site. At least one of said oligonucleotides is specific for the at least one gene or genomic sequence selected from the group consisting of Septin 9 (including all transcript variants thereof) and/or ALX4 and comprises a sequence of at least 15 base pairs in length but no more than 200 bp of a sequence according to one of SEQ ID NO: 1 to SEQ ID NO: 2. Preferably said sequence is at least 15 base pairs in length but no more than 80 bp of a sequence according to one of SEQ ID NO: 1 to SEQ ID NO: 2. It is further preferred that said sequence is at least 20 base pairs in length but no more than 30 bp of a sequence according to one of SEQ ID NO: 1 to SEQ ID NO: 2.

[0239] Said test kit preferably further comprises a restriction enzyme component comprising one or a plurality of methylation-sensitive restriction enzymes.

[0240] In a further embodiment, said test kit is further characterized in that it comprises at least one methylation-specific restriction enzyme, and wherein the oligonucleotides comprise a restriction site of said at least one methylation specific restriction enzymes.

[0241] The kit may further comprise one or several of the following components, which are known in the art for DNA enrichment: a protein component, said protein binding selectively to methylated DNA; a triplex-forming nucleic acid component, one or a plurality of linkers, optionally in a suitable solution; substances or solutions for performing a ligation e.g. ligases, buffers; substances or solutions for performing a column chromatography; substances or solutions for performing an immunology based enrichment (e.g. immunoprecipitation); substances or solutions for performing a nucleic acid amplification e.g. PCR; a dye or several dyes, if applicable with a coupling reagent, if applicable in a solution; substances or solutions for performing a hybridization; and/or substances or solutions for performing a washing step.

[0242] The described invention further provides a composition of matter useful for the classification of colorectal lesions. Said composition comprising at least one nucleic acid 18 base pairs in length of a segment of the nucleic acid sequence disclosed in SEQ ID NO: 3 to SEQ ID NO: 10, and one or more substances taken from the group comprising: 1-5 mM Magnesium Chloride, 100-500 μM dNTP, 0.5-5 units of taq polymerase, bovine serum albumen, an oligomer in particular an oligonucleotide or peptide nucleic acid (PNA)-oligomer, said oligomer comprising in each case at least one base sequence having a length of at least 9 nucleotides which is complementary to, or hybridizes under moderately stringent or stringent conditions to a pretreated genomic DNA according to one of the SEQ ID NO: 3 to SEQ ID NO: 10 and sequences complementary thereto. It is preferred that said composition of matter comprises a buffer solution appropriate for the stabilization of said nucleic acid in an aqueous solution and enabling polymerase based reactions within said solution. Suitable buffers are known in the art and commercially available.

[0243] In further preferred embodiments of the invention said at least one nucleic acid is at least 50, 100, 150, 200, 250 or 500 base pairs in length of a segment of the nucleic acid sequence disclosed in SEQ ID NO: 3 to SEQ ID NO: 10.

[0244] While the present invention has been described with specificity in accordance with certain of its preferred embodiments, the following examples serve only to illustrate the invention and are not intended to limit the invention within the principles and scope of the broadest interpretations and equivalent configurations thereof.

### Example 1

[0245] In the following study, the methylation status of plasma samples derived from patients with varying type and stages of colorectal lesions was analysed in order to confirm lesion specific methylation within the genes Septin 9 and ALX4.

[0246] The assays were MSP and HeavyMethyl assays as described above, methylation specific real-time assays for the analysis of bisulfite converted DNA. The assays were designed to be run on the LightCycler platform (Roche Diagnostics), but other such instruments commonly used in the art are also suitable. MSP and HeavyMethyl amplificates were designed to be detected by means of Lightcycler style dual probes. Each assay was run in triplicate on plasma samples obtained from a commercial provider.

[0247] Study Population

[0248] Samples were collected from male and female patients ages 40 to 80 but predominantly ages 50 and older. Case report forms were reviewed by a physician and severity of disease determined. In total, serum was collected from 36 patients with adenomatous polyps (13 female, 23 male, median age 63.5, range 24-75) and 13 patients with hyperplastic polyps (5 female, 8 male, median age 58, range 20-73). Serum was also collected from 22 individuals undergoing colonoscopy for various other reasons without neoplasia or preneoplasia of the colon and rectum (negative control) as well as 5 patients with colorectal carcinoma.

[0249] Of the polyp serum samples 7 samples were taken from patients with polyps >1 cm with dysplasia, 9 samples from polyps >1 cm without dysplasia, 17 samples from polyps <1 cm without dysplasia, 3 samples from polyps <1 cm with dysplasia, 13 samples from hyperplastic polyps of which 11 were from polyps <1 cm and 2 were from polyps >2 cm. The colorectal carcinoma samples were obtained from Stage 1 (4 samples) and stage 3 (1 sample) patients.

[0250] Plasma Methylation Analysis

[0251] Plasma was processed first by extraction of free-circulating DNA using the Total Nucleic Acid DNA extraction kit (Roche Applied Science) and Roche MagNaPure device. Eluted DNA's from each patient were pooled and concentrated on microcon filters. DNA Methylation information was preserved by deamination of unmethylated cytosines using sodium bisulfite as described above. Bisulfite treated plasma DNA in each sample was quantified on the Roche LC 2.0™ device using a non-methylation specific assay for beta-actin. ALX4 methylation was determined by means of the MSP assay. Septin 9 methylation was determined using an assay based on the applicant's HM real-time PCR technology (see Cottrell S E, Distler J, et al. NAR 2004; 32(1):e10). The 90% limit of detection of the Septin 9 assay was estimated as 21 pg by a dilution series of methylated (SSS1 treated) DNA in a background of 50 ng blood DNA (Roche human genomic DNA). The Roche LC 2.0 was also used to measure Septin 9 amplification. A plasma equivalent of 1.6 ml to 1.9 ml of DNA was added per PCR reaction and each plasma sample run in duplicate or triplicate.

[0252] Assays

[0253] Genomic region of interest: SEQ ID NO: 1; Assay type: MSP

Primers:

(SEQ ID NO: 11)

cgtcgcaacgcgtacg;

(SEQ ID NO: 12)

cgcggtttcgattttaatgc
Lightcycler probes:

(SEQ ID NO: 13)

actccgacttaacccgacgatcg - fluo;

(SEQ ID NO: 14)

LC 640-acgaaattcctaacgcaaccgct-p
Amplificate sequence:

(SEQ ID NO: 15)

Cgtcgcaacgcgtacgactcaaaacttaataactccgacttaacccgacg
atcgcgacgaaattcctaacgcaaccgcttaaaacttcgcattaaaatcg
aaaccgcg

[0254] Temperature Cycling Program:

| | | |
|---|---|---|
| activation: | 95° C. | 10 min |
| 55 cycles: | 95° C. | 15 sec (20° C./s) |
| | 60° C. | 45 sec (20° C./s) |
| | 72° C. | 15 sec (20° C./s) |

[0255] Genomic Region of Interest: SEQ ID NO: 2; Assay Type: HeavyMethyl

Primers:

(SEQ ID NO: 16)

GtAGtAGttAGtttAGtAtttAttTT;

(SEQ ID NO: 17)

CCCACCAaCCATCATaT
Lightcycler probes:

(SEQ ID NO: 18)

Gtt cga aat gat ttt att tag ttg c-FL;

(SEQ ID NO: 19)

LC-Red640-cgt tga tcg cgg ggt tc-PH
Blocker sequence:

(SEQ ID NO: 20)

CATCATaTCAaACCCCACAaTCAACACACAaC-Inv 3′

[0256] Temperature Cycling Program:

| | | |
|---|---|---|
| Activation: | 95° C. | 10 min |
| 55 cycles: | 95° C. | 10 sec |
| | 56° C. | 30 sec |
| | 72° C. | 10 sec |
| Cooling: | 10° C. | 30 sec |

[0257] Results

[0258] A replicate was determined as positive if it presented with greater than 4% methylation, a sample was determined as positive according to how many of the replicates presented methylation.

[0259] Single Gene Analysis

| | | | | |
|---|---|---|---|---|
| | ⅔ positive | | ⅓ positive | |
| Total sample | # | % | # | % |

Septin 9

| | | | | | |
|---|---|---|---|---|---|
| Normal | 22 | 1 | 4.5 | 4 | 18 |
| Polyp | 49 | 6 | 12 | 17 | 35 |
| CRC | 5 | 2 | 40 | 2 | 40 |

ALX4

| | | | | | |
|---|---|---|---|---|---|
| Normal | 22 | 4 | 18 | 14 | 64 |
| Polyp | 49 | 23 | 47 | 38 | 77.5 |
| CRC | 5 | 2 | 40 | 4 | 80 |

[0260] Panel Analysis (Septin 9+ALX4)

| | Total # | ⅔ positive | | 3/6 positive | |
|---|---|---|---|---|---|
| | samples | # | % | # | % |
| Normal | 22 | 4 | 18 | 2 | 9 |
| Polyp | 49 | 26 | 53 | 24 | 49 |
| CRC | 5 | 3 | 60 | 3 | 60 |

[0261] According to Polyp Histology

| | | Septin 9 | | ALX4 | | Septin 9 + | | Septin 9 + | |
|---|---|---|---|---|---|---|---|---|---|
| Polyp | # | ⅔ | | ⅔ | | ALX4 ⅔ | | ALX4 3/6 | |
| Characteristics | samples | # | % | # | % | # | % | # | % |
| >or = 1 cm | 18 | 3 | 17 | 10 | 55 | 13 | 72 | 12 | 67 |
| <1 cm | 31 | 3 | 10 | 13 | 42 | 13 | 42 | 12 | 39 |
| Tubular or villous | 36 | 5 | 14 | 17 | 47 | 20 | 55 | 20 | 55 |
| adenoma | | | | | | | | | |
| Tubular or villous | 11 | 3 | 27 | 8 | 73 | 11 | 100 | 11 | 100 |
| adenoma + >1 cm | | | | | | | | | |
| Hyperplastic polyps | 13 | 1 | 8 | 6 | 46 | 6 | 46 | 4 | 31 |

[0262] Furthermore, of the 10 adenomas with intraepithelial lesions 80% displayed methylation in at least 3 out of 6 replicates of Septin 9 and ALX4.

[0263] Conclusions

[0264] It was determined that the sensitivity of a real-time PCR assay for detection of polyps larger than 1 cm was 23%. Our results indicate that the Septin 9 biomarker is also highly specific (95%) in asymptomatic individuals over 50 years of age.

[0265] The results of combining Septin 9 and ALX4 in a marker panel indicate that sensitivity for detecting polyps can be considerably improved while maintaining high specificity. The marker panel detected polyps larger than 1 cm with a sensitivity of 67%. Sensitivity for large adenomas (>1 cm) or adenomas with IEN showed even greater improvement (100%, 80% respectively). Specificity of the panel in asymptomatic individuals over 50 years of age was 91%. Patient compliance and performance of current screening strategies limit the effectiveness of tests available on the market today. An easily administered blood-based test for early detection of colorectal cancer followed by colonoscopy for positive individuals has the potential to be a very effective tool for reducing mortality from this disease.

TABLE 1

| | | | Methylated | Methylated | Unmethylated | Unmethylated |
|---|---|---|---|---|---|---|
| | | | bisulfite | bisulfite | bisulfite | bisulfite |
| Genomic | | Associated | converted | converted | converted | converted |
| SEQ ID | Ensembl database genomic | gene | sequence | sequence | sequence | sequence |
| NO: | location | transcript(s)* | (sense) | (antisense) | (sense) | (antisense) |
| 1 | Chromosome | ALX4 | 3 | 4 | 7 | 8 |
| | 11:44238570:44291195:1 | | | | | |
| 2 | Chromosome | Septin 9 | 5 | 6 | 9 | 10 |
| | 17:72786362:73008270:1 | | | | | |

The application's sequence listing, which the Patent Office published only in electronic form, follows.

SEQUENCE LISTING (20 sequences)

SEQ ID NO: 1 - DNA, 52626 bp, Homo Sapiens
ggaggaaggagaaggagtttattgcaaataacaacaaccaaacagtttgggctgggccagcaaagggtgttctgggagtgcccggctacctctgcactccattttgccccatgcctgggcccctacatctccttcccatccgtgttcctcctctcccaaaaaagatgtaagtgcaataacttactttaaaaggcaagaacgtttcttttaatattttgctataatgtagttacatggtggtataggcagtaaaactttatggaaccgacctcatttttttttttacatttttctggatttttactgtatttttaatatatatttttaatattccaccccaggccattaagctaaaggaaaagttgcatttatacagggttaaaatatcttacaatgagaacaataagtaacggttgaggttcatgttccttctagcactcagctttcttttttcaaccactgcacacctaaacagatgattagacattgaaaactgtccttcaaaatcagtagtataaaggcctagctctatgtgtgtgagtgaagagggaagaaaggagaggccgaggttaggtcatggaagcacctttcctccctacagcatcctgaaagaagtgaagtggggttgatgggtcattgtcaccttcttattttttaactggatagtcacagagtattatcctgggggccagtttaccaaccatcctcccccagctaggcctgtttgcctttgcactggacagtaagggccatgaaacagaccaggaacccccgcgtgtctttcaggttctcgaagatggccccccactgtctagcccagggagggaatgactgcataagcagggtacgtagttttcatggaagcgtccctcgtctgcccagccgaaatgacaggagatggggcacggagctgggtccagtgtgatcacagctgtgtgtgctggggacccaccccacacttgctgcacctaccccatcgcagtgtctttgagctaacctggccaccgtgcttcccgaagctggaggcacggtagtgagcgctgagaatcaagtatagttaaaagaattcaaggaaagttctaaaagcccatgtcctccaagtgctatttcagccttggagacaagcctctctgtgtgccccccagagccctcgctcccatgccccaggagtagtgctggcatctggagggcagtagcagcaccttagtgtcaagccttgccatgctgagacctgtgcccagcagggactggaggctgtcagtgtggggaggctgcccatccatctgccggctacccacgactttatttttaagttgccatctctgttgagatcttaggcaggtatccaaaggaaatcctcacctctcttagcttattcgcatagcaatgaaccacgtggcaggtagatgcttctctccacctgccttcatgagctttagctccagatggccttgggcagctgccctgacttgctcagtcatcctaggagctgacacggcagtggccccctgctctgcagtgcagaaggttgggcctagccacctgtcttggaagggactgggccccaaggttctcttctggagaactgagctgctgagtgaatgcccatgaggcattggagaggggagctccatgcagcaccggccgcccctggtgccaacgaagcccaggccctcacaccctgggtggcacgtcccaggctcctctctcagcctagtctcagggcaagtacaggtcagggcagtcatgtctccactctgggccagggtcttctctgttgtgaagggactggactaactagagggtttctaagcttcctcccaactcggtggtcctatcatacttagtgtggttaggtggcccccaagggctgggccaagccacagaggacaggcctggggtacgtggctgcctttgacgagatgaacaggaatgtttcacattggcatgtttaatcctagacacttcctgggtgtgttgggacaggcagccatagccacagagtcttctaatagacgccttttcttctcaagcttttgggttgaaatttgcctgacttgggtctagcccagccagagagcagacgcatggaggaactgagtgccgggggccactgcggaagagcccccttaaagctctcactctccctccctgcctgctctggagctacctgtctgtcctcctctttgtcctgattcccttgctctccctcctggcccactctggagctacctggctctcctcctctttgtcctgattctctcatgggtgagaaagacccaaggtgaaagttccttccttccccatccttcctcagccatgagcatttcagaaggaaaggggggagaaatggggaaactgttcccagccttaagttcttcctttccctggctagattttgggggagtctgggtcatttcagcgaacctcagaactagaaaaaacttcccaaaagtcactccaaatcctcaaatatttgaaacacttaaagccaagcctccaagaacatttaattcaatgtccaagaccctttcacctctataagatccattttagagctacggttcacaaagaggtctgactcattaagggaggccacagccagacccttcctcagcctggtttctagagcagatgagaacaccaggcaggcgggagactgtcacccccaaccccagagaccctcattcaacaacaccaagtttaccctccgcccaacccaggaggcctttctgtgtccacgaccctgagcatagtgggcctggccctactccatgacaggaatcaagggagaaggtagaaaaggcgagcgcttcaatgcggggcgctgcctgctggagggaccccccacctggggtctgacaggcctgcctctggacggttactgtgtactcccagctgaggtgagggctggggctcagggccagacccaagctacaggggtcgggcaggcaggcacagagccccgcttcctggaggcaggaagcctggtttcaggagggcatcctgacagccccatttgcaatagcaaagccacaccgaggagcccaggccaggagcccttccgcaggctggagagagggcagagagtcctggtccctgtggaagaagtgtaaggacggagtgtggaaagctgtgtggagaagagcaacacctcctagtgcctggagggacacagagcccccatctgccgtggaaggctctgggcagcgatgacactgacagatatggcagggaggacagtcagtttgaggccatagcagggcctggaggccgagcatggccacacgtcctctagcaaagcctgcacgcagcttttgaccctctgccacccggcccccaagctctagcttatgtgttccgaagttgtgagtccttccatgccgggacactgctgagcagccccagggaggggccagggtagggcagggaagagacgagcccctccgcatcctcctggagggaacctgactgggctctggatggagaacaaagctgcccagacctccccgctgtaccagatgccaggcaggccggagagcgggaggactgcccgggcccacgccccacccggatgcctccccctctcccaggacctttccttcttctagcaccatgggagcccttgtggcatctgtgttctcagcctccctcaggtctggctcctcccctatagtgtccagtgaggggctggcccgtgtctcccctggggactggcattgctagatggcagcaggggtcctcggctccagctcctgtcatcctctgcccactctctccaggtgtatccagcctaggggacagccaggatgcagtcagccaggctctgtcagactcgtcactgttcggggggaggtggaggctggcgccttggccccagcaggtcggattccgtgtgctttcagggagagaaagatgggagggcaggaggctggctctgcagggcagcctgtgcttcagacacacagccaccggcctggtgaccaggggaccccactaggagcgggaaggatggacaagactgggctggtgaggctgctgggtctgcatggaaatctagcattgactcatggtcaactaggcagagcagaggagtgggcgggagcaagaaagcgctttcagcttatcatggatgcgaagctgaaaaacgtggccacctggctttctccactgcctgtggccgggagcaggggtcagggcctcagtgccagggaggggccaggggcctgctgccccctccctcccagcagtccacggggcctcagacttggggcggctgaaagtgctgagggtcaggcccctggcccaggccaggttcctaagaggaaagtcgagtgggaggctgggggcctggaaaacatgggcgtggcccatggtgtcccgaggtggggacggggcaggggtgccctgtcatgtggcccaggaaatggccgcactgtgctccttggccttcatgcggagggccgcgatgctcgaggtcttgcggtccggctcgccgttgagctcgtagccattgaggcctgggctgaggctggctgctccaaacaggctgcccatgtgcgtctggcccacgtgactgccagccccagacacactcaggaagtcggtgacgctgctggccccagagccaggggggtgggcatgaggggacatgcaggcaggcaccgggtcgcaggggaccacgcaggctggcactggtgaggcagccccgttgttgccgagccaggacgggttctgaatctgggagaggaagggagagatgtcaccggctggcgggcaggtgtggtgtggaaggggctcgccccttcccccagagcacctctcccctcactgtccatccttcccatgaagcccctcttgagtgtttagccttgatggacatccagatacccctgtgggggtggcttttacaccttggcatctctgttcccagggccaggctagcagcagagggaaattcagttctaaagagtgacctcaggcttcattaagggtccagtggaagggtgacaccccagcaccccccagctggcttcctatttttagactcaactgtagacttggcctccatctgcggatggcagctgtgtctcattcacctccagctcctccccaggcccctcacatccataggcacctgagcaaggtgagcagacctcaactcggagagctttggcctcgcaggttcccttgggcccccaccagtagcagggaagatggaggggttgggtgaggtgggcggcagggacctaaacctctcagaaaccaagggtcagtggctgaggttccagggcctgaactaggaggcttcagaactaactcaggatggaaggggctgcctcaggagtggacagccagatctgagaccggacctcctcgtgccaaaggggcgagggcatgtgcagggatgagttggccatcttatcttccatctgtgccactgggcttcccttccctccccaacgttcacctggggctcccatcttcctctaccttctaggcacgtataaggaggtagaattagggtgtgggggagacccgggaacctctcagcttatgcacacgggattcctggtaacctcatgtgggcttctgctggcctgccctcctgcatgtgtctggagcacactcgagggaggcattttaaagcagggagaaagagctcagcccccatcctggagggaaccgcatttctctctgcggtgcaggggaagggggaccggttggcctccatcaccccctctcagaagaggtctgagcacacactatgtggtgctgtaggtgaggtgggggtaggaggggtgaacagggccctgtgttgggttctccctccagctgtgcgctcaggcagcagagctcaaagccaaggagggagctagagttccatcctgggaggacagagggaggctgagtttagggagggagaggggagaaagagaatggaagaacatagtgcgagctgatgctgatggtgcctgtgtgagacaccccatattcctcagcctcacctccaggcctgtgccctgccctcctgccccatgaatcctgggctgggggagagggaacagagggctggtctggttggagagccagagaccatttgctagcacagaaccaggtcagggagaagtaaaggaggcaggggcgcccgtgctactggctggctgctgagcagggccaggttgggagctgaggtggaggccatgccagaatgaggcctgagcaggtagggagcagccgcttctgctgggcaggctgagtgggggtcaggagaggacttggacttggccaaaaacacatctctctaagcatcccatgtgcctgatgtgactcaatacttctcatcccttgcatctcacactagaacaggggactggctgacagacacctagggaaaatgctctggggggaggggaggacagggccccagaagctgagcacaggcacacaagctttttgaaactgtacaattcacaaaatacttttgcatgattgaatttagaccttacaactgcctgacaacagagctgagcagatgcttttaccatgtccaaggtacaggtgaagaaactgaggctcagagatttgagacttgcctaaagtgagaaagacctggagctggaaagataacctaagtccccggactcagaatcccaagctcattccaacttggccacgagtcctggagatttcagagctcgctttctgaagagaccctccgagcggtatctgagggcctggtggccttctgcctgccttggttccgatgcccacagcaaaagtggccaaagctagtggaggaaagagccgttctcactgccccaaccttcccttccctaaagttcagccaagcctggttcaatgattagttggatagattaaccctgggcctcccacactctggtataaacaggcacacccctggaatgagacggaagggcagcctggagccataagtcatctcggggtgcctgggctctcctccaaggggctcattctcagagcaccaggggctggggatcggtggcggcagctcagggcgggacttacctgggcgtagttctcagctcgggtgaggaggggcagctcatatgcagtggagaagtgggttcgaacctgctgcatctgcccaaaacgctcccgcttcctccacttggcccttcggttctggaaccagacctacaagacgcgaaaaagccattgtcaccagggtgagatgcccgcctggaggcctcactttcaggcagtgcaaactgttcccttgagccccccatcagttgcagtgcgtttgggaaacggtgcggccacacataaatatcaaccttggtctttgtcctcaagagctgacaatctagaatcatccactctgagctgggaaggtatcttacccccactagccatgggcgtgatcctgagccagaacttttatttttctaagcttgagaatctagagcagccaagtgtcaccacctataaaacaagtcactggtcatcttagcagtcatctaagcagactcctgtggagaagctgataaaagctacaaatgctcctccagatgtgttctcctagacaatcacacacagttttgccacagttttccaaaaggttcatggctctctaaggcttattggtccagattcacaatgccttcctccctgcatcctgtctgcagccttcttgttggagacagtctcccagctcagaactcccctgtgttaaagggagaacaggggctctgctgggcaacagaggcagtcagggaagacttcctggaggagggacaggagctgggccttgaatggttggctgaaaggaggaaagccaaggcctaggtttagaaacagcaaggcatactccaaaaacctaaagaggtcaatttgaaggaagcggtgggagagaaagaaacagagtcagatcgcagggggccttgactgccaagtgaagggtttttcccttggtgctgtctgtagaggcagttgctataaaatcttgtgtagaagcgtggcctgatggtgagaggaagtggaggccaacccgtcactgagcacaagtggatgggatgttggcctgattgggagcccaacgggggaggggaggtctctgagtcagctgtgagcactggggtttttggtgacggggagtattgggtccttttcctttgcacgagcatttctggaaggctgagaactttcccaaggctcaagagcaagagctgccctacccctggcccatgacttaggatctggagaaggggtgatggggacggggtgggtgagagagggagagtgaggagggatcagcttccaggccaggaatggctttaggctgattcagagatggaccgtggtgctcctcagagggaggcctctgccagcttgatgtgcacttgtctgctggctttgcagactcagatgcaagtgggcacacctcagacagcacgctgcagaccgggagaacagagccatgacaatagcctcagctgcagagccataaggagccttgccaggcccttccaggcccaggcatcaagaaagccaactttcctgaggtccagtccctgctctccaggtggaaacatttctccatccatcacgaccaatgcagctgctgagctaaatataggagtcagctctcaaaattcctctgcctcagagcctttgagcttcctaggaaccactgcgaggaggggagaaggaggtgtggacgtgcttcctcacagacgctgcctggcctctttgggcatccagtgtagctggccaatggacaggctcataggagcactggtattgccaagggcctcagtttctgcatggcgaatggtacctcatagtcgcagcaggggagatagatgggaaatgcagtccaagaatgtttagagtacttcccatttgtttctttacagctcctgacctttctcactgtcttttgctagaggaaagaggtcaaggaagatggggatgtatctcatgttactgtgaggagggtgggggtgagcaggggtgtacattattatgtttctccactcctgtaccaactcactttcccctccctaatcctaagcatgtgtgtgcgtgcacgagtgtacccactagtgtggctacacgcacgtgcatgtgtgcacacacattgactgggggaggagaagcctcttccttagaaacggaccctctccccagtttggggtctcagcccctgccctggcctcccagggccccttttcctccagggattcctagggtccaggccctggctgcccactgggagccaaggacagatggggtctcctctctgtgctgctgaaatgggatccctctttatcagtggcctgggatgggagactggggccaggatgagagaatgaatcagaggagcttgttttcatttcatgtttaatttcctgcaggcttagctccgtctttccgctccttcctcagcctcccagggttttctgtgggggaagctggggggaggggagaagccactggaggcacggagagagatggcttctctttttctttttgtcactgtgactgttggggttctccttgtgtctctgtgggttccaggtccccatggtgggactgtggaagtggaagatgtccctacaggctctggaacagaggatccagggatgggcggggagggaccccgaagagggaaggaggtggccagcgcctggcaaaggggtctagagtggagggaggagccatgtgggggagtggaatgtggggcgcgggctcgctggagctgagtgtgagggaggaggagatgtgggttatctggggaagacagatgaccaggcgggggagaggccagcagagctagcaccgtctttggaacaggagtggaagaaggtcaggctgagggatttatttgagggctgaagatggaaatggtgagaggcgggtgagcgaccggtgggagcagggctgcccacctcctccctccttcttctcctgttcctttgtcctggggccttaccctgcgcacccagttctggcttttctgcccagatccagacatgagctaggtgagcctggccggtcctcaatatcctccccagtaaattggaggcagcaagggtatcctcacgaccccttctatgctcacatctgcaggtcctgaggcttggagtgtccatccatttctgacccctggcgccccaggggctccgagagctcccttccagatgccacaccaacccccacgcccgttcctgtgcctcccagctctgcaccgcaggcctgtctccactgtgcagccccaggaggacagccaaccacgaggtccccactgttctcccggtctgaatgtcatacctcaggaccaccccagcctgggcccactcagcacaggcctctcccgaggaccgggctgtgcaaggaaccaactgtcttggcggaggcctcgctaaccgcagcccatctggggccagggcggggtggcccagggcggggaggcctctgtcttattgtcttcagacaccagctgcagagattggaatcccagacagcagagagaggcccctgcagccccctggagcagggccaaaccctaggcttcttcccaggaaaagtccatcttggggcccccattgccccgtccctgtccccaccaccactctacgccaggcacctggcttgccaccagctgagtatgggccctgaacaaacacagcagaggcaggcagggggttccatcaccacccccttacccccccagggcactgccaggcttagggctcaacccagaggtctgacgcacatgaagatcccacccaccctgctgcctttatacaaagaaaagcctctgaacaatctggcatgtgtccttgtacagcaaactaaagtcaaagaagcactaggctgcgactcaggagtcccggattccagtcgcagtgctgctactgagtggctgctgttaacttcaggttatgacttcccacctatgggcctcttcttcctcgtctatcaaatgggaagatggggtgatcatttccagcactaccgttctatagttctgtggtcctcccactaggtgataagatatgcagcacgtcagagtttccctttctgccttggctgccaggaagctccaagttgaagtttgtgctcaatggcaaccatgaaccttagcctaaatttttttttaccacattacctctgcatttcatgccattgttcttgtttttagattgaacaaataaatctttaattgtaagctacctcaactccattttggaagtaggtataagtgtgtgtgtgtgcgcgcgcatgtgtgtgtgcagagaacactctgttttagttgtatggtggcaactgaaaaatgctctgtgcgcctttgttttcatgttttgtactcaaggcgtcattcttctttcagtacttagtgaattctactcccgggcactcccatatatttgttaggaagcatgcatgcaacccacatatgcaaacacaaatgtacacacatactgcacagaaaaggaacaggtttatcccacaccaacacagcacctacagggctgtcccataaccagctatgcccctttctctacctacacctgtgggtcctccccaatccatttgctggagatcaggctagatgctaggattcctgtccaaactcaggcatgtaaggtcatgtgagtggctggttgtccaaattcaagtgagatctgggtgtgtgagggcttctggattcacaggaaagccccagctgccctgtcatccttcatcaaacattcattaggcactggaggggaataaaatggcagtcttgccaggtgcagtggctcatgcctgtaatcccagcactttgggaggctgaggtggtggatcacctgaggtcaggagttgaagaccagccaaccaacatggtgaaaccccatctctattaaatatacaaaaattagccgggtgtggtggtgcacacctgtaatcccagctactcaggaggctgaggcaggagaatcgcttgaacccgggaggcagaggttgcagtgagccaagattgcaccactgcactccagcctgggcgacagaacaagactctgtctaaaaaaaaaaaaggcagtctgggctgggcatggtggctcacgcctgtaatctcagcactttgggagaccaaagcaggtgcaccacttgaggtcatgagttcaagaccaacctggccaacatggtgaaacctccatctctaccaaaaaataaaaaaaattagctgggtgtagtggtgcatgcctgtagtcacagctacttgggaggctgaggcatgagaatcgcttgaacccaggaggtggaggccgcagtgagccaagatcacaccactgcactccaacctgggtgacacagtgagatcctgtctcaaaaaataaaaaaataaaaaaaaaatggcaggctgccctcagggaacttacagcaactcaaccgtgcagctcttcagcatcacttctggtagctgcagtttctgaacagctacatatttactgataaccactagtccttttccacattagccattttggaaaaaaagtttgtagactctattagagatgcctctgccttcttaaacagaaaatggttgtaactgatgaatcttttactgatgccttagaacaatgctgctgaagatgctttcatgagttaattcaagagtccctggggcctgctgaggattgcagggttggggcatctctgtcctaacattgaagggctcagcccactgagctgcatggcgctttgctgattaaaaaaaaaaaaaaaaaaaagatttctctttgttctgaagctattgatttttctggcccactggagagggaaaaactgctatgtggcaacgttttatttgctatttccaacatgctttgggttggaaaagcggactgattatgacatttattttgtgttaaattgaaacttaaacttgagtgtgtgaattttgtcacctgtattttggctactcatgggtcttttctttctttctgatcctttctttgctgtgaattcatgctggtcggggcagatacagctctctggacaagggttgattgatccacggatacttattttttagacttgatgctctgcgtttggctttctctaattggtgggaatacagtgatgaacaatcagtgcttgatctcaaggaaatcacagtttagtaggaggggacaaacaagtaaaataacgtaagccagtcaacaatcctgtaaagaagacaaaataggagttgggcacagtgtctcatgcctataatcccagcagtatgggaggctgaggtgagggattacttgaggccaggagtttgagaccaacatggacaacaaagcaagaccccatctctacaaaaaataaaaaaacttatcccaggcgtggtggtgtatgcctgtggtcccagctactcaggaaactgaggcgggaggatccattgagcccacgaagttaaggctacagtgagccatgatcacaccactgtactccacgctgggtgacagagagagacccagtctctttaaaaaaaataaacaaaaatacccaaaagataaaatgggcccaggcatggtggctcatgcctataattctagcactttgggaggttgaggtgggatgatcactttagcctaggagtttgaggctgcagtgagctataatcatcttattgcactccagcctgggtgatagaatgagaccctgtctctaaaaagaaaacaaaaaaaatttaaaaaatttttaagaagataaaataggacagtgtaacaaaaggtgagctggtttgcttctgttgtgttgggttgggttgagttctattgggttgtgttgagtgggttgagtgtgtcaggttccattgtgttgtgttgtgttaggttgagttctgttggaatgtgttatattgggttgtgttgtgttggaaggggctgcattaggtttagtatgttgagttccattgtgttgtgttgggttgagttgagttctattgggttgtgttgtgttgggttgggttgagttctattcggttgcactgagttgagttgagtgtgtcaggttccattgtgttgtgttgtgttaggttgagttccattggaatgtgttatattgggttgtgttgtgttggaatgggttgagttgggttgagtgtgttcagttccattgtgttgtgctgggttgagttgagttctattgggttgtgttgtgttgggttgcactgagttgggttgagtgtgttgagttccactgtgttgtgttgtgttgagttgagttctattgggttgtgttctgttgggttgcaatgagttgggttgagtgttgggttccactgtattgtactgggttgggtgttttggttgttggctggtaataggggggctactgctttagccacagtggtcaggaagacttctcagaggaggtatgagttgggacttgaaaaatggagggggatgcagccatctaggcagaaggaagagctaaactgttctctgtttctgcccactgggatgctgtggacattgtcttcatgtttgtcctgtttcctgtctaagagataggccttctagagcagggacaagtaacccttctctgtgtgaaagagccaggactcttacactgtgtaaagcccagaaacagccagcagcagccttcctgcccctctgctggaggccctccttcctttgcaaccccccaccacagtgcagaagcccaatattaaagaggataaaagcagagtcgctctagttgggacaggggcatgaggggcaggctaggagcccccactttcaggttctcaatgaactgaggaaaggaaagccatggtgtggttggtgggcagtcaggagaccccaactgcagccaagagcccagggacaggctctgctttaccagcctcactcccaggtggccctcactgacctgcacgcgggcctcagtgaggtctgtcctcatggccagctgttcccgcgcatacacgtctgggtagtgggtcttctggaagaccttctccagctcctccagctggtagctggtgaaggtggtccggttccgccgcttcttgcccttgttgctctctgagtcggccttctccaatgggctggggaggtctgagctggcccggtcctggggccccttcaccccagcctccttgacactcaggtagctgctgtccatccccacagtgtcagagtcagggggtaactctggctcacccagggagctctctttagctgagggaggaggaaacaaagtcagaaaccaatggttgaaccaaacaagagaaggggaatgtcagggggagagtggggcactcgggtagccaccccctgcctttttcctcttagagctcattggatgcgaggtccggagacttggcttctaattctggcttgccattaacttgctgtgtgaccttgggcaaatctcttccccaatctgagcctcttcaccatcatcttagactaggtcccttccagcaacaatgttatgtgaacctaaggcagccaatctgacctctgtgacctttaatccccacctcactgaccctgagctcctctctctagagggattccctgcatcaggacttttctggggcccgagaattctgaccccagtgccatggcctccctgggtggaagggaaactcattcagcagccatgtctggcccagtggggcttggggtgaggaggacccaggattgaggcagacaggagtgcccctcctttcctggcctagtcccaccaggagttcagcaggagctgtggagactctgccccaagagtccagtgctgaggagtcaacacctccttccctgccccccaaccctgcacactggtctcacctattgttcaagagaagggtctttcttccttgggggtgcatgggattgaggcatgggccacatttcctgttacaagcagctcctgcccactgtttactgaggctgcccgggcaccttcatccccagcacgctgaccccgggcctgggtgggtgtacatgagcacagctcccagccactgcgtctggcagatggaccccccacccaccggcacattcctagctcaggactgcaaggacgagtcaacccatacacatcaagaaagaagaggtggaggctggggtgggagagtgaggcaagaagccactttaccaccacacagcctggtgagcttcctaggcagacacactcacctcctggcagagggtttgggacaacagtccctacctttttggcaccagggactggttttgtggaagataattttttccatgggtggagaaggttgtggtggggcatggtttggggatgaaactgttccacctcaaatcatcaggcatcagattctcttaaggagcacgcaacctagatccctcacatgcatggttcacagtaggattcacgcctctgtgagaatctaatggcaccgctgatctgacaggagccagaacttgcagtaatgcttgctcacctgccgctcacctcctgtgtgcggcccggttactaacaggccatggatcggtactggtccacagcctgggggctaaggacccctggtttaggtcatggactcttgatagccccgccatgaatcctatggccatgactccccagctgtgtgctcaggagagcttacctacccgctatgtgcctcagtttccccctctataaaatggggatgaagatacttctaggatcttcctcatagggtagctgtgggaaataaagaggctagtgtgctagctatgtagttttgccattattgatattcacatttctagtctggacttgcaaacccacagaccctgtgaacattagaggactccgaccctggagaagtcctccaagcatgcaggcccttgggcacaggagcatgtgcagggcgtgcacagatgcctagggaagggcagccaactgggtgtctgcagatgtgggtgtgaactcctcgagaactgtattccttgtctgtaacttggggaaaaggaacttgttgagtgaaagaacaaacacaattaataagacgtttggggagcatttgacacgacctttcacgtgcacgagctttgatcatcacaacaagcacgtgtggtaggtgtgagcatcagccactctgacccgcggtttcttcttctggaaataggtccaagcgatgggcattaagtgtcagaatgatgcctctagtccaggtcttctgactccatccagatcctgagggctgaagcttcagactcgtctcattcctggctttctgtgcacactggggaagctgagagggacatttggcctgtggcattctcgcctccctctccaaggcatcaaggaaagggcatagaggtgagtgcccagagtaggcctgaaagcagcttcaggaggctgctcctgagggccactggcagtgcagacgccatgggggtgcacgaccggcccagcggcatcacgcatgacacctgtgtgagcccaggcacatgcagacagccatggcttcagtgacaacattctgcaaactgcagctggcagctgggccaagagctttcagcaaagatatttatcttcctggcagacaaatacattttatgttttaggttttttttttttttttttagaaaccccacccagcctcacaaaaataaccatccctgttttgcaacttcctggaagccagatgaggggctgagggaggtgagcactgagccctgagctctgatccccaggccccatctcacagccccatagacgcttgctggggattgggaccaccctgcacagcaatgggagctccatgttacaggaactgagagttggtatggaccagcctgaactcctagttttaactggggggaaactgaggccagagagagaagggaacatgccccaattccggacagagcacagcctctcagctcctggcctgccctctactccctcccctgcggtcttaggccttattcccagggagagaggtaggggcagaaggaacccaggggcctcatatgaccaaggcgtcctgctctgtccatcttgtggggggcaggaccagcccttgaggatgagggagtgaggatgcggcctgggggcagcctctcagcactgagccagctcttggcctttcaggggaagtggcagaaggtccagtcttcatggtgacaagtaagggtccagttttgcccacctccagctgcccactgagaccaagtgagcaggcagagatagaggtggcacagggtgtgcgaagaccaccaggccaagagttgggagccctggcctcggcccccgctcttctcaggacttcagatgacccatttcatctctggagtctcacctacaaatagggagagcggggtagttgagggtccctcctcccttgctcaccagcagccaggactgtccctgaggacctggggaggggaggagagggggagggtgtgcctgtgtcagagatggaaggaattcaggggagcgctgctcctggttcctcaaggaagaaggaagcaagccttctaacctgtcttgagtcagcttgctttaaattctgaggctgggttcctcatttagacaacaaagaaaaattccctgaagttctgcagctccactcaactggtcagaataacaagcacagccctctcagagtctgagtcctaagaccccaagctcaggctgtctatgtccacctctcgccaccctgcagcatctccacctggcgctggttccagtctagggtagcagggagctcactgcccccaggacagcagaactactcatctttagacccagcccatgtctgtctcctgtaggtctggttcactgattccagttctaaccccccagcgcccttccccatgacagccctgtccctgcggacattgggaggctactgccacccctctgagtctcccttccttctgcagttcccactgctgttcctcgggtggccctgagtttctccggcctgtgtgagacagagggtggcagggatgatatgaggagtggggctgggccctgggcaaagccagcagattgctctccagggagatgaccccgggctggctggagtgtcagcatggtagctgaaggcctgggtgctggtcagatctgactccccgcaaggtgccctcctcagcaagacggctgctgaaaatagaagtcccatggctcaggctgactgctcctgaccaaaggaaaccactgaccttggtcccccaagtccccatctcgggcccctgcctggcatgttcctccttccagctgacctccaagatccaatgctcctccaggaagccctcccagattgtgactgttttccatcctctgctcaccctctccactgactgcctatgtttgctgactcgtaatctcatcaagccccgaatgtccagctcctcctatagaatgtcagttccccaggggctgggacctcatgccgtttgtcccttctcagcctgaggctcagcacaggataggtcaggtggcagagatgcagtaagaggttgctgaggaataaatgaacaatttctaactaacaaacatcactgagctctcgctctgtccaggtatctgtgtgcacctttggtgagccgatgttctatagagcatgtgcagaaaatgtctctcgagtaaatgaaccaaccgcctcatcctcctacccactggggagaaagtcgggtgggatacattgaaaaagggcacgcaatgacgaatgccaccattcaaggctgacagcacaaacagcaaaggtcactgcgggagacaggagagaagaaagacccagacagaccttgagcgatgtctccatgcagagagcaagggacagaaggagaagcagagacgggcttcataggggcggctccagaattgaaaccaaggtccagaaacccagtccaggatctgccaggaactggctccacacccaccctgccaccacactggggtagagaagaccgccagggagctctcagtttgcctggatgctgggcaagccttcttcagagccttggggcacctcgtgctggcataaggctgagcagcaacagcgcccagcgtgggtccaggccacccgccaggggttggacttctcacatcctccctggagcagctccttgtggacccggaaaggctctatgctgatgcccctcccatgatgagtttgtcccagggctgaggctatggggtccaagacaatgtagtcccaatctgcagcttcccagtcttgatctggaagtaaacccctgactacttagagccatcaatcaagtagtgaacctacatcactgagagcaatgcctgctccacggagggtgttgtgcacgcagtgtggccatcatggtatccagtgctcttcaaacaatcctaggtcagcattattgccatagactgcttttgatgaagtgggaagcattcagttcaaggttgtattctcaatcgggagccactgagcccttcaacctctgctggaactccccctggggggacccccgtaccactgggagctgtcgtttctagtgctgggaacccctggctgttggatttcagctggagaaatgcatgaagtggaaagccttgcttcgttcccttaacctctacccatctgtcctggttcaacccaatggcatcactctaatctagttttacctttttaaaacaggaaaacccttgagaggtttccaaaggtgactgatttttcttttttctttctttctttttttttttggccgtgatttaaagaatgaccttctagagccattttagggagagggtgctggtagcatctgtatgtacagatgtacacccgagggcctgtggcacaagtctgccattgtgagtgggtgtggggaacatatgtgtagttgcttgtggataggtttgtggagtgtgcatgcttgtgtggtcaagcgcaggcacacaagtgggatgtgtgtccccgtgggcagttgtgtgtgggtgcagatccgcgtgggtgggtgtggacatgggtggtgtgggcctgtgtggagccgtgcacaggcccatgcatatggcgctaaggggtctcagtcattttatcctccatggttttgattacatctatttttcctccaaacatctgctttgtgggggacatgccgcttgctctgttctcgggtgagctggccccacacaccctgtggcggagtgcacacaccgatgtaatctccttaaaaaaaacaggccagcatgaggccctttcatgctattgaaagggcactgactaaacccactgctgtccaaacggtcctgtgggggtgagggcggaggttaaagtttagccattgatcacgtccccaccccacctcatctgacactggggtctgtccagagctcaacttgaatgtccctaatttagctccagtcccaataaataatgccaaaggggtagtagtgactgggcttagatttcagcacacatgcacggggcacagctgtttgcagagacagacagtgtcccggccctcaaggggctgccaatcttcagcagagggtggggtggaaatggcagtcctcaggctagccagtggcacaggccatcctgctcacccacagccaccaacccaagccctgaaatgctctcgaaataaggaaagtctgagaaactgccccagactagaggaggccaaggaaccatgaggactaagtgtaatcaatgtgttctggggggaatgctggaacagtaaaaggacattgggggaagccagtgaaatctgaataaagtgtggagtgtagttaatagtaatatttaacaaaaagtgggcaaaatattctagcagacacttcacccaagaagatctacagggagcaaataagcatgaaatatgctcaacctcattacccactatggaaatgcaaattaaaagcacaatgagataccactatgtgcctatcacagtgggaataagacctgatgatgccaagttacggcgatgtatggagcacccggaactcccatccatcacagtgcaaacacttgggcggtgtcttatctagttaaactaacactgacctcatgacccagcaatcccactcctaggtatttaccctacagaaataatgacttattttaagaggagaggaacccaaacccataggcaaatgtctgcagcagctctattcagaatcaccccgaaatggagacacccccaagtgtcctttgacaggggaatggagacgcaagctgtggtctatccaggccatggatcgactccacagtgaaaagaaagaactgttgacaatgacatggatgaatctgaaaggtggccttagggtctgtaaacaaagccagtctcaaatttacatgaagtgcaactgcactcagctagcacatgaattctgggaaaggcaaaactacggggactctaggcaacagatcactggttgccaggtgtaggaggagggggaaggtttgtttacaaagggcttgcactggtgtgatggaactattctgtatcctgactgtggcagtgaatacatgaatctatacatgagtgtgttaaaactcataaaagtatataccaaaaagttttttacagctgggcgtggtggcttgcgcctgtaatcttagcactttgagaggcagaggcggatggtggatcacctgaggtcaggagtttgagaccagcctggccaacacggtgaaaccccatctctactaaaaatacaaaaattcgtcgggcatggtggcagccacctataatcccagctacttgggagggtgaggcaggagaatcgcttgaacacgggaggtgcagattacactgaactgagatcatgccattgcactttagcctgggcaacaagagcaaaactccatctcaaaaaaaaaaaaaaaaaatttacagcatgttgttttcaaattttaaaaaatgtaactaaaaagaaaatacaaaattgtgttcatatatataaaacaaaaactaaattaaaagtttatatgccttcacccagaaatctcacttctaggaatttactcaataaatgatggtaagcattcactagagagaacgttcatcatgtcatagtttaatatgtaggaaaaccgacagtaatcaaaatattcaacaataggggattggttaaataaaggatgatatttccataaatggaagatccttcctgatagtctttattctgcacgttgtttctttttttgagacagagtctcgctttgccacccaggctggagtgcagtggttcgatctcggctcactgcaacctcacctcctagattcaaacgattgtcggacctcggcctcctgagtagccaggactacaggcatgggccaccacaccccgctcatttttgtatttttagtagagacggggtttcctcatgttgcccaggctggtcttgaactcctggcctcaaatgatccacccgtcttggtctcccaaagtgctgggattacaggcatggaccaccgcgccaatattaggtatttatttgttcttctgttttccccttgtttattgtctctctctctctccctcccatggagcagggaatatatctgaacatgtgtgctttgtttaccctgctgtgtaacacctagtatcatagctggcatgcagtagatgctcagtaaacatttgatgaacaaatgaatgagatgatgctaagaaaggatagcgttttaacacatgcaaagatgttcaatttatatcaaataaatctcattttgatcaaaaagaggaagggagtggagcatttgtcctcagaaaatactacaagtttccagaagtggcaatatgggtctatgggttaattttgtttcttttctttttttggggggcggggcggggctggtctgaattaattttctatttgttttcccaggaacaggttgaaatatctgaaagcagtgattagaatcctggatggtgcatgctctgagagcgggctgggctctgtgctgtgggattatgggaagcaagagacaagcaccacttggagagactcagttaaactggaattttagataaacagttaacactttaaacaatataagtatatcccaaatatggcacaagaaatacttttatcctacaaattattcattattcaaatgcagatttgactgagtaacctggttttgttgtttgcttgcttgctttttgctaaatctgccaaccctgtacatcaggcttatgtggcattcagggtcccgaaggcaggactggtccccaccagactcacggacttacacgccagccttccatctagcttgaggttcagagacctgcttccgctctgcagcgcactgcacgagtatcttcaggcttccgcactcctgcgggcacccttccttctacctagcatgtctctctgcctctcctgtctgtggctaactactactttcacctggatagctttctctgtaacttttgtgacttttctttcgcattacaaatgtaatctatgttctatatggaagattaaaaaaaaatcaagacagaccaaaagaaaatcactcacacacatacacatacacacacacacacaaacacacacagagaaaacattactttgtaaacttttgtgtttttttttgagatggagtctcgctgttgtcgcccaggctggagtgcagtggtgcactcttggctcagtgcaacctccgcctccccggttcaagctattctcctgccgcagcctcctgagtagctgggattacaggcacccagcaccacgcccggctaatttttgtactcttagtagagacagggtttcgccatgttggccaggctggtctcgaactcctgacctcagatgatctgccttcctgggcctcccaaagtgctgggattacaggcgtgagccaccgtgcccagcctataaacattttagtaaaatctaaccatattccgtacccctttccatgctgttctatattcttctaccacaccatccttaatggttacgtagcgagaacaatcactattttatttaatccatccttttctgttgggctcacaggtttctacttgtttgaaatcatagcaggtctgtgatttaaatctctcaatacatgcatggcgattcccttaggagaagctccaagaactagaaatatgaagttcaattatccacatatctgagggtctctgagaaacacggccaagttgtcttccagaaacatgtaatgtcctcagctaccacggtgtcccctcccacttcagagccaataatggtcattatagtgtttttaaaatctttgccagcacgatggatgaaagtgagatcttgtctttcctttttttttttttattttttaactatggaacattttattttttgttttcttctgctgtgaattccctctcctgggctttcaaagctcagccaagggccacccttcttcctccaggacctcccttgcctcttaaacactgaatcccctgctttacagcaccggctcatgggcctgctccctccctagactgtgagctggtcagagtgggcctcccagatgtactgctggggcctgggcctcgtgtgagtaagggctcaggacacacccctggaattaatgcaaatgcctgtgtgtgcctgggttgagggagactcctctgggctccttctgcctctggtttggctggggcagctctgcaggcacagctgagggtggccagtgtgtctgcaggaaaaggccccaggccctggagctgggctccagacacaggaggtccttggtcccctgcacacactgcttgtgtcaggaggctgctgcatggagtcggaagaagggacctttcaggatgaggggggtcgaggaaaccagccacagcgcagggcaggaaggaccaaagatgaccccggcagctccctggccctggacaaacctcttgccttctgtttgctcagctcaacaacattgcatgaattcctgccagggaggggtatgagaagaggagatggaggggcacagccctgtgggaagccaagactgaagaggagtccccggccctggctgcttacccagaaggctaagcattcaggttccagggcccaactcccagcaggccaagatcaagactgcagttgtgcatgctggccaccaggaggcactgcagttccaataaagtcactggacggaaggtgatgatcctggggccccagtgcctaatgaggtttctagacgtttgtttgaagacccaggtcctagctgggaggatttgccactcaagcagtaattcagccctactacgcgtctgccaccattccagcactacaagggacaaagagatggatggggcgggtcgctggccttccttgcaggggtctttcctcccctagttctgggtattttcacattcctgcctcattccagtctcctcagaattcccacactgtggccccagcatcctcattggacagacggtcaaagtgaggcgccgagagaagggacccaccagtgtcactagtgactgagtgacagacaggctgagacctgggctctttttcattccttaagtggcctccctttggagacccatggggattccttggccctccagagagggtggcgcacagtgggtgctcaggaaactgactaacttgcaaaagcctttgccttgcaaaagctccctaggacacccctgtcgtttggcccagcggctttccatgtggctggcagacttgttaccagcttccccgtgggttcttcccgaggcaggcatccgccgaggcagggtctgccaccccgtcctccactgctccgccctcacacagaagctctctcagttcttcctgcaatggcaggggtgagtggggaggactgtttttctcttagtctagagatggagtgggcttcccagagtccaggaacgaaaagggattaatgctgggctctcgcaaaaacaaaaaacaaacaaacaaactaaacaaaaccaggaactgggctttgtactttacaaagtactagggcatctattatgccaccagtagggttccagcctctttacaaccgccaggtttccattttatagccccagaaactgaggccagagggggtaaatgccttgctaagaatcaataactgttaagaaggtccaggggtggtggttcatgcctgtaatcccaacattttgggaggccgaggtgggagagtcacttgaccccagagttccatctagcctgggtgacagaggcagagacctgtctcaaaaaaaaaagaaaagaaaagaaaagaaaacaaaaaactggtaagaggcagagctgagacttgaatctcatgcctggagcatgcctactgggccctcctggggtggatgctgtgggtgggactgggacaggcagacaggagacagggtcaaggaggaagggaggaagtcacaggagaatggctgctctcagctgcctcaagagattggcccccttgcaacaaccttcaaggctgcccctgatcaaactgctctgctgaagatcaacttcattgaccatctgggacctcagatgtggaccagtgccttgtttcagggcctacacacactgaagtacttagaggcaaagaggcatatgagtcatatgtctgcaacttactctttttttgtttgtttgtttttagacaaagtcttgctctgttgcccaggctagagtgcagtggcacaatcttgactaactgcaacctctgcctcccgggttcaagtgattccctatgttggccaggctggtctcgaactcctgacctcaggtgatccaccttcctcgacctcccaaagtgctgggattacaggcatgagccactgcgcccagcctgcaacttactgttaaatgatacagctgtatatcgtatgcatgtatatcaatacatacataaacagagcatatgcacagagagagacacagagagagacccagagagattgaaaataatgcaaatatggcaaaacatcaccatttggggagtcagcataaaaggcatctgggaattctttgtagtccacttataactttaagtgtaatactgtatcaaaataaaaaggtttttaaaagaaaaggtatgtggactaatggaaagaaggcaccttccctaggaacccctcttgtgaagctggcatatgtaatcatttgaacaggacctggatgagtttacctggcaacctccccgccttcccctcatcaccaccaccattcataattctacaaggggccttgtacgttgcaataaaaatcacaagacaaatgccaactctgggagcacacattgctccccagccctctggaagccctcactcccgtggaagccactgtgacccaattagaacatggggctcctttaagcagctcttctgagagctgtaggagaccaaggtcaagctactgttggaacttaaaagtttaaaaagtactttaatttttgagtctactgtaatttcaactgtcctacagttagtccaaatgagtaaagtttccttgtataaaaaaaagaaatggtggaaagaaagaaccctaaactttgtccagccctcagcccccatggcccctctgccaaggcctgggtcccctccatcccccagcttgtgtctggaatttgtctttcctgttctctcccccaccctgtgtcttgccttactgattcattcagagcttcccttaggaatcatggcctagtggaagagatgcatgagggacaagcacggtcaagtgttccagggtccccagggcaaaagtcttgtttcccagacacggcagggcccacagaaaggagcggtcaattttggttgaaaaggtcggagaaggcctctgcaatggagtggctcttgaattgggtattgccagtcaaggaaggctcggcaaggcatgttgcattttatggtaaaacaagataccaagataccatcccctcaccccaaatagggcaaatcccaaattaccaagctccttagacaggagctctccaaccagggctgattacaaccatgacagcaataatgtaatgccttgtattcgtgttgccctgacccacccactatctcctctgaccctccccagatcccatgaggtcagtgttggtatctctgtttcacagatgagaaaactgaggtccagtgaagatgaataacttgctcaagatcacatagctaggaggggcagactggatggtcccatgccaagtccactgcctttcaaggtggtgatgagttatctttctaacatggaggggtcaggcaggcttcattttgttctaagggggcattgctgagccactggggtcatttctatctcaaaggactagggtaaaccaagcttcagggtctccatgagaagcccatgtatgatctaacacttggagatcacttcctgatgcctcctggggtgggatgggtgttccagcttcagtctgggctctaagtgcccctgtcagcttctctcctcaaggaggctagaagtttcccggctcctcgtcccatccccaagctccatctcatggcgtgggtggttggatgagaccctgtccccggcaggacccactgccagagaaacagagtctcccatgctctcccctatcccagcaatacgtccgcagggttcagagaccccactggaccagaccctcccttcacagccaagatgcggaggcccagagcaaggtcatactgcctgataatggaagggccaggacttgaaccctgcacctcctgcatccagccctgtggtctgtctgcccattgtccctctcaagccccctaaaccatgtggccctgggcgtgtcccaagacatctctcacttaattcccccaagcctctgtttcccttctgtagcagaaagaatcctgcagctccaccaccttcaccaagacactgtaatatcactttcatccagaggctggcgagatggaggagcttagatcctgcacgaggcaaaatgaaatgattgagaagtctttggggtaggacaggcctgggcttggcccctggctctgccacttatttgctacattgattcattcaacagcattcctggagcaccagctatgcactgggcaaagttccaggtggtgaaaatataaagcccagtaaaacacagtcccttccttcaaatggctcgcctcagtgacaggggccatggttacagtgcagggtggtgaccagggcaggggcacctagcccagccttggggcgactccagatctctgtagaggaggtgttttgaagcagcaatgttgttggagaggtctgttgaagctgtgtttagctaacgcttcacataagactagggaatgccagttttccccatgaaagaaatgggagccgactaaaggagattattaaggaggctcccaagccaccttgtggttctgccacagaagggtatccttggaaaagtgacttgacctttgtgtgcttcagtttcctcatctgtaagatgaggctgagaacatccacatcccagaatggctgtgaggtctgactgaagtagagtgcaagacggcatatcccctgacccacacacggcacccactctatcaatgggacgttgccatgatatattaacacagttatgatctggggatgaatttggccgtggcagctgacagccagggcaacgttgctcagcctgcaactgtgtcacccccacctgcttccttccccaggtgcatcctctccagttcaggtttcccgagcggcagctcccagaatgacatttatgaaccataaacctctgtcaaaagtagctcccagggtccctttcaatgaagggcccatttcacatacatataacaaagactataaatggggtgaaacattggcaactgctgtaaaaatcaaatgttaaatttatttggttatatagacttaaaaaaacttttaaagagtggattcacggcagcctctgcctttagactgtgccctcaccaagggcaggggaggggtgttacgaggcagcgttatcactcgccctgcctgttgtcactgtctggcacccaagtacgtgctgaattgagctaatcttaaacaattgaatttctttctttctttctttctttttttggagacagggtcttgctctgctgcccaggctgaagtgcagtggtgcgatctcggctcactgcaacctccgccttctgggttcaagcgattctcctgcctcagccttccgtgtagctgaggctacaggcacatgccgccacacctggctttttgtgttttagtagagacagggtttcactcttgttgtcccggctggtcttgaactcatgagctcaagcaatccgcccgcctcagcctcccgaagtgctaggattacaggcatgagccattgcgcctggccaaacaattgaatttcttagcctgcagaagcagcatatgatcccagaaagaatgtgctgctttcaccaacatcaaatcttttctttctcaaatgtgctccttctttaatttttatttatgtatttatttatagagacggagtctcgctctgtcacccaggctggagtgcattgatgccatctcggctaactgcaacctctgccccccaggttcaagccattcttctgcctcagcctcccgagtagctgggattaccagcactggtcactgcacctggctaatttttgtacttttagtagaggtggggtttcaccatcttggccaggctggtcttgaactcctgacctcgagatccaccctcctcggcctcccaaagtgctgggattacaggtgtgagccacctcgcctggcccaaatatactcattccaatctagagaatcacttacaaactgaaaaagcaacaaggcttttctccccttggatgagaaagggaaagtaatggctcaattaattataagattgctttttttttttctgttgcctaggctggagcacagtggtacaatcacagctcactgcagcctcaacctcctgggctcaagcaatcctccctcctcagcctcctgagtagctggtactatgggcacacaacatcacagctggctaattaaatttttttttttttttttttttttgtagagacgaggtgtcactatgttgcccaggctggtctcaaactcctggattcaagcaattgtctcacctcagcctcccaaagtgctggaatacaggcatgagccaccatgcccagtcctagtttgtactttaggaaagtcatcaacttccttaaagttgataagaatgggaaagattcttcaatatttgctttttaaaaaatccacatttacaactataaaatagttaacaattcaaaatatctaaaggataattatacctaaaagttttggttggtgtttttgtataaatgactgggatttggagtagatgggttcccaggattttgcctatcacatatagtaaggataaaatataaataatcaatgtttcagcattcacaattaacatgttagttaaaaatggttcttttggccccgcatggtagctcatgcctgtaatcccagcactttgggaagccaacgtgggcagactgcctgagctcaggagtttgagaccagcctgggcaacacagtaagacccccatctctataaaaaaaatttttaaattagctgggcgtggtggcacaagcctgtagtcccagctactcaggaggctgaagcaggagaactgcttgagcccaggaggttgtggctgcagtgggccatgatttagccattgaattccagcctgggtgatagtgagaccctgtctgagagaaggaaggaaggaaggaaggaaggaaggaaggaaggaaggaaggaaggaaggaaggaaggaaggaaggaagcaggcaggcagggagggagggagggagggagggaaggaaggaagaaaatggttttttcattgacttctgctcatctgaacaaaataaaaaattcaaaaaagtctcttctttaaaatgcatgatgtggccaggtgcagtgtctcacacttgtaatcccagcactttgggaggctgaggtgggcggatcacctgaggtcaggagttcgagaccagcctggccaacatggcaaaaccccatcttaaaaaaagaaaaaaaaatatatatataatgcatggtgtgtcccttctaccaagcaaaccttaatccacagcgaacgtgagacaaatacatctcttttccacctgttactacttcttggcaggatggatcccctgcaacgggatagatctcctgagaggatactttgtgtagcacaaaactgggctctgtggaatcttctctcatggggctaaatcctgggggatgcattaatacagcagagcttgggcacatacattccctgaggaggcctggccctcactgtccacctgccacatggtacaagtaatatttccaaactggcctcttgcccctggcttcgccaacactgggctagtgaggaggctattactcgttctgtttagaagggtttgtctcctccttctttacccacaggagctgctcccacatatcacatgggggtcctgggctgggctggcctggttctcaggatggctctggagggaggagggagtggtgtctgggcggtcaggggacatggtcatcatttcagtagatgggcgaagatggtgtagcccacgtacaacatgcagtgtgctgaaaacccctcccagtgcaccccctccaccgtctacagagctctcacatgctggtcaagtctgatgggcacataggcatgagggcatccaggcagtgggcatgagccccctgggcaggggaggaaaaaggctctttggcttcaggagatctgggttcaattcacagcgggacagcctcaccttcctcatcttcaaattgaggatactaatatctcccagtgggtttccacaaaaagtctcagtccaggtgtggccaagggcaatgcccaccaggtgctttcttaattgcagatggggcccaggaagctggggcccaggaagggtgcagaggttgcctgacattccctgagcccgattctctgtgctcagccctgtgctgatcagagaggaacacagcagaacccctgccctggggacaggctgaagttctgggtcaaataaacacagaaaacacattcagcagggagagagttattccccagctcatgacacatgtgtacgaggtgcagcagcctatggggaggaggggcctgaggggcctgggtggcctttgtccctccttgaagcctgcccccgctgcgttaggtagagatggcagcccccgcccctcccatcactcatccatgttttaaaagacaatgtcaaccacacagtaatcatagattcagtaataatttcttcattttccaactctatgcatcccagtcaactttaactgcctgtcaaggtttccggccagtctgatagagtcaaggttccagcaaaatcttatcaatcataacagctaacattgactgagcacttactatgctccaggaactgttctaagatccttacctatttatttatttatttatttatttatttatttatttagagacagagtttcgctcttcttgcccaggctggagtgcaatggtgtggtctcggctcactgcaacctctgcctcctgggttcaagtgattctcctgcctcagcctccctagtagctgggattacaggcgcccaccaccacgcccagctaattttttgtatttttagtagagacagggtttcactatgttggccaggctggtctcaaactcctgacctcaggcaatccacctgcctcggcctcccaaagtgctgggattacagatgtgagcaaccacacctggctttgtccttgcctattttaccttatttaagcctcaccctatcactaacaggtagacatgattcttatccccactttacaggtaaagaaactgaggcaaagaggtcaactaatttgcccaaggtcactcagctatgtgggctgaaatctgtttccaggtcctgagcttcatgggcttctccaaaccaaaggcatctgaagcatcaagcagcctgtgtagcacaattgtggaatgaacagtttccatgattttccaagaaccctagaaattatgccttagggcacatggctggaagaccaggctcaagcaggcctctgtttagtcacctaggccggggaagttcctaggaaggggagccggggacagctacttctctgcagctgtgctccccttggactctgctgtctagtccctggagccccagcccctggttgtgccattcactggatggcctagggtaggggacagggagttgcaagtgcctcttttgggaatctaacagaaaatcttcaaaatatgcatggggccaacagcatggagccactggatgcttccttcttggagctcctccaagctccgctggaaggattctggaatcatcttaataaaggaagtggtcccagatgtgcgcatctcaggaggtgggtgtatagaccctcagagcacaaaagaatttccccaaaggccacgtcctcatgggatggtcaactgaaggggcagaggggcccccgaatatccaggggcctagccagggccaagactgtggctctagagtcctcgcctttggctctgccctccaccccttctcaccagctccaggtcccggaaaacaaatgtgtccttgagctgaatttctgtgacctgttggtcactggcctgcaggcaaggagatgaacggatggcctacaagggtccttgtacattctgcaatcctggacttcacatcagaagatcattcaggggccagatagacaaatgcaacagaatagagaccagatgtaaactctcaaatacatgcgcaattgattttcaacaaaggtcccaagaccggtcgatgagaaaagggccatcttttctacaaatggtgctgggaaaagtggatatccccataaggaagaatgaagttggagagccttatgttacgtcatattcaaaattaaagtcatcaaagacctaaacctaagagctaaactataaagctcttaaaagaagacataggcgaaaatcctcctgacactggagttattgacgatttcttgaatatgacaccaaaagcacagacaacaaaataaagaaattgaaaaattgtacttcttcatcaaaatgtaaaacttctgtgcatcaaaggacagtatccagggagtgaaaggacaatccatagaatgagaagaaatattcgcaaatcatgtatctgaaaaggaattaatatccagaattcctatgactgaagaacaaggaaacaaacaaccccattcaaaaatgggcaaagtacttgaatacacttctccaaaggagatacacaaatggccagacgccaaaggagaatactgtatgattccacctataagaggtacctaaggccaggtgcggtggctcacacctgtaatcccagcactttgggaggctgaggcgggtggatcacctgaggtcaggagttcaagaccagcctggccaatgtggcaaaaccccatctctactaaaaacacaaaaattaggcaggtgtggtggtgggtgcctgtaatcccagctacttgggaggctgaggcaagagaatcgcttgaacccgggaggtggagattgcagtgagctgagattgcaccatttcattccagcctgggcaacaagagtgaaactctgtctcaaaaaaaaaaaaaaaaaaaaaaggtacctacagtaggaaaatccacagagagagagtagaatagaggtcacttgggtggggggtcaagggtgtgatggcggttcccgtttaataggtatggagtttctgtttgggatgatgaaaaagttctggaaacagtggtgatggttacacaatattgtgggtgtacttaatgccactgaaaggttcacttgtagatgttaaagtggtagcattttatgctatgtatattttaccacaataaaaagttcattcttaattaaaataaagattttgaatgcaaaaagcaaaggccatactgaaccatgcaaagaacactcagcctggggtctcactgttttgctcagagccctccagtggcttccccaaagtctgaaccctttggtagaaaataaatggcccaggggccaggcgcggtggcttatgcttgtaatcccagcaatttgggaggctgaggcgggaggatcacttgagtctaggagttcaagaccagcctgggcagcatggagaaaccctgtctctactaaaaatacaaaagttaactgggcgtggtgacgagcctgtagtcccagctacttgggaggctgaggtgggaggatcacttaagcctgggaggcagaggttgcagtgagctgagattgcgccactgcactccagcctgggtgaccgagtgagaccttgtctcaaaaaataataaaataaaataaaataaaataaaaagctctcttcagctgtgcccctgccattcctcagcccacctcaccggcatgcatcatgcccctgcactccacacacttgcttcatgttcttcccttacccgaagacttagtttgtgctgtttcctgagtctagagggcctctttcatctccttcagctggtgagctcctattcaactttcaaggtccacttcgaatgtccatgctcaggaagccccaatccattcaccttccctggggattcccatggcatgtagcacattctaaccaggctatgggctctctgagggcaggagccagttcattcactgccaaacactctggtccctgcctgacacagaagtgccaggctgaaggatctgttggatgtaaggaggagcttttgccaggcgcacactcctccatgcattccttctgagctgttccccctctttgaactttggcttccatctgtaaaatggagattcaattcctccacctaggcctttggtgagactcaggggaccatggatgttcaagtgccctcagattgcatatgccggggtgggacgggtggacggaatcatgggtgtgctgggaagagcccaggccttggagccggatgccctgctgggaacccgggtgaggtcagatggcatcctggccagaagagagggctgcatcccttgcaggtgagtctcagaatcccagggtggaggatgagtgaatgggggactaagggaggaacctcagcagctctcaggcagcaccctgggcaggtggcaggaatgggggtgccagcgggcaggacacggaactcactgtagggaatgggggagacctgaggaggagagttggggatgaagggagaaaaccatttggctagagccgaccccgggggctgtggcagtcagaccgcaggcctgtggccagtggggtgagacccaaaagaggagcagtgaggaaaaggggtactcctccgactgctagagttggagaagaccaagacttgtgctaaatagagctacccagagcctcgctgctcctacaccccacaggaaaccctgcaaaaaaaaaaaaatcaataattttctaccagaatgcaagagaacgacaaagcaggctctcaccccaggcctccattcaaaggaaggatgaacgaagagagagtggaaagacttacagagttcctagcatgttcccctcctgtaagatcccttcattcattcactcagcaacagacatttattgagcatctactatatagactagctccaggctctggggaaagttggaatcaaaacagacaaagcctcctgcggtctctcatgtttcctagagggcactgttcccacagatgctcctcagctccaccctaccttgatcagaggttctctcatgttcctgaaacttctggaaactcatgcagtcattcctcataccagctatgaggccctatgccatgcctgggacactgttttcacctggtacaggtgaggaagctgtgcccaaggtcacagagtcaggtgtagaacttcaacctgacaggtgccgaaatttactcctgacactacttgtcttctgcatccccggttgtgaagctgagaagaacgctttgggggccatggtttttttttttttttttttttttgtgagatggatcttgctctgtcacccaggctggagtgcagtggcaggatctcggctcactgcaagctccgcctcccgggttcacaccattctcctgcctcagtctcccaagtagctgggactacaggcgcccgccaccacgcccggctaattttttgtatttttggtagagacagggtttcaccgtgttagccaggatggtctcaatctcctgactttgtgatccgcccgcctaggcctcccaaaatgctgggattacgggcatgagccactgcaccgtgccctgggggccatgtttgtaagaccctgtctttcatctccacatcatctgggatggaattagggttatctcaagtctaatcaggatcattctagaacaggatgccttttaggtttcttggagccctcggccagcaagactcgactcttccttcctggctgtctcactgtggacgagttacttatcttccatgaacctcagttttcatccacgaaatggggatgataatagtaccaatctcataggattgtgatggtgattaagtgaaatcatgcataagcagcactggtgtactgcctggcgcacaggcagggacgctcagttgttctgggctgtctcatggttctgcagcagcagccaactctaagccttctttgccttaaaacccattattgtctctgtcctgtagatgggaaaactcaggccaggagccaggcctggcatcccagactcttaacctttggcagactggaccagccttccccctttcctggtacaatgaatggggaagagtgtggggtcctgaggcatcttgaggattctggagggccaattcacccctcttggtgaatatcacagaaccccaaggcctctgaaaccactgagtcccatgaagaaggttcagagatggggaggctgaggccacaacaggggagccatgcagtagagctatgtgcatgtttgtcttccccatttgaaagtgagctccctccttgaagtcagaggccatggagctggagttgtcccatctccatgctgggatgtgagccaggtgtgaatggatccttgtggccacatagagacatcggggaggctcacatatccaggaggaccccaaactctacatacacactctaaaacctgatcagaaccccaccactatcatttgcaatatcctagcaccctcaaagggtatagtgtgaggggtggggcagagaacctggtggtgcaggatgtacggggcagacacactacctctctccatcatcacatcctcctcatactcccctcccaggtgggacagggccaaagtgccattcaacacagggagaaatggagtggcactagagaagtaagggggctgttatacatgactatttccatagaaaaaccaagagaaagcatggagggagaaaaggagaaagtcaagagagaagaagcctcaggatttccagccactagagaaaactcattggcctggacaaatcccaacttcccccaactttcctgcaccctccccttaagtggcttccagtaagctaccaaaccctggtggcgcctgcacgccccagggcaagccagcctgaccttctcctcagagcctgagtcagggctttccccatctcagggcccatcccactgaactggaatttcaaggtcacttgtctgtctctgcctctggacctgaaggcaggggctgcatccagagcttcccagaataccccacaaggcttggcatagtgacaggcaaagtttggtgagccttgcgtaaatggaatcaagcctctcagtcccctttgtctgtgaaataagacatgtgggccaggagatgactgccatctcttccaaccttgagtgagaccccccaacatgtcaccatgacccattgtgtgtgtgctgcagggtcaggggaggtaccagtttcctcgatgtaaccaaaggccctcagggcctggtggacagtcctacacagtgggaggagttggtcatctggcctcagctgaccctggcttgtggttttcaagaacttaggaaaagaaaacccagcttggggagctgggcagagagcaggagtcccagcctggtggggctgcattagagtcaggtccctgcaatcccaccagggattccacgggtgctctcctgctgtcctctaatgcccaggagctcatggcggggtctgctttacttctaaggagactgaggcagaactgcaagcatctgccctatttgatgcacagagagagtgcaacttactggacttattgcaggagtcgcatccaacaagagagcgggtgagtggattggattccccaacactttctgcctttccacccattgtagtggaaggaggagaactcggtgggttcctgccctcctactaacctggctgtgggggtccatttccccttgggcctcagtttgctcatgtgctaaatggggtcagcagtgggcacagacagtgccaaggacacgtctcttccgcagtgagccacacgggacagagggtatattccagagctggtggcttgtcagacggcctcgccgcagtgtgggtgggctggatggaccatgttcgagggccccaggatgacgcggggggtggttgggccccaccggggacttgccacagggagattctgcctgccactcggtgagtcagctgctcctgggagccatgaccaggggcaggaaggccacaggccatgatgcaagggcgcttagtcattctccctgggggcgcctctggaggcagaggctatgccacccacagacccagagaagctccagagccgtgcacacgggtactcacccttgcacacctgaggctcgcacactgggggacacagacacaagtgccagaggacagacatgcctttcaccggactacacacaaaccctcggcctcgccctgaaacactcagatagcaggacgtggacccagagagaatgggcacggcacacaccgctcacattcatgctgtgcacacgctcacacaaacacctaagctggctcctgggtgcacttaaccatgtgggggcaacactgcaggagacaccagttcttcattcattcttccagccagcgaacatttgttaagcccaactgtacaaaacacttggaaggacataagccgtaacacaggaggcagggacttggcatgttctacctcctaggagaaggtccgcccagggaaggtgctccataaatactgggatagggaagatgagtggacacaggggccatgagcccggggcctcagcttgagcctggtcacaaagacacttgcttaccccctccctatttgcatcccagtcctgagcccagaacctgcattccaccatggccctgtaggacctctagccggctttgtgtcctgtgatggctccccactcaggacctgtgttagcctccagggaagccttttccacccaccttaccccagtttctcctggacaaaaatgcgtgtgggggtgaggagggaagacaaagggggtgaaggtgggcccagactgctaccagcacagaaactccaagagggtctttggaaattgtcaacactcctgcatttcatacagctaaaattcagaccccggagcagaacatacttctccaaggccatggaggagtagagaatgcaaaggtggaggctggggtgatctacaccgcaactgtgggccccggtccccacgtgtgccgcgctggacatcagtgtcatggtccaaacctcccacagcttcccagccttctctgttgtggccttcagagccctggagagccagttgttctgctctgacctgggtcaccaggtcctgtccctctacgaggtgcgtggggccaacatccatgctgggcctccagttcagaatgaaaatccactcttaaagaatctgctttaagaatccgatgaagcaagcactggctccctctctgcccccaatgtgcagcggcgccagtgcccagcagccttgaccaagcggtcccgagtacaagcggcgccttcaccgggaaagataggtacttggcagccggtggcccctcttaccccgcccgtatctcccagtgaccccctcctcaccaaaacggcaccctgggagccgcggagcgccacggtgacccttccaactgcctctggagtccaaatccgaaccggtccgcggccctgagtaccaccctacacaccccagccttggctcctcagagccttgcctctgcgtggctcttcctcgccgctgagccacaactcccttccattcctctctttcctcggcgctggctggtgcgggttggggtcaggtggagaagccgctctttgttaaggtgacagaacgtgctgggggtgggggccggggccagggccggtgcaactagggggccgctgccctttcctggacacagtggaagcttcttccgcatcaccaaatttttgtcatcctttctgagggacctgcttccaggcagcacgcaagttgttgtcccgggtttactccgcacccctctactgggtgaggaaggagcatcttgaatggagatgggggtgtccccggtttatacatctgcagagaagaggtgtgccgggctgcacctctggaggccgcggtaactgatattagagaagaccccggttgcagctgggaaggctcactggctggaaagaggtgcctcctccttccagcaaagggccctgtttggaagggctgcttctcacctgtctagtggcaccacaggacggtcggcttccactcgaattcccccggacggtatcatcacatagccgggtcctcgcagtgttggtttcccaatccgatgactgtcacctcggtgaggacctgtgctgatggccggagaaccctgcgctgcgggcgcacatggccaggtggcgcctggcaggcgacgtccgggtgcaggacggcgctcttaccgccccaccccaaaccgttgcctgggcctaggtccttcggcttcctgaacaggggtttggggggctaaggacgctgaggctccgggggcaggaagttctctctggttaagcgttctctcttctctccggcatacactcccctacccacccacctcgcctaccctcggggcgagaggctcaccaaggcagggcgcgccccccccatgaatcatcccaaggcctctgagccgcgggggctccgggcaactatccccctcctctcctggcctcaggcaccccagtccaggggtctgcagagaagcccgaagcccggacaaacgcgccggacgtcaacaacctctcatccctggcagcagcaaaggccaatatatttccatttcttatttcagtttgccaccaaaacaaagctgcgcgcggctgagggcaggaaggcgctgagaccgagaagaagggacgtcccggagaaagtgcgcccagctgatcttagaaaccagagtcctccgggacttcgccgagattttctgtagggcgttttaatctgttttcctactgcgtgccggcgtcgcagcgcgtgcggctcagggcttggtgactccggcttagcccggcggtcgcggcgaggttcctggcgcagccgcttggaacttcgcattagaatcgggaccgcgcaaatgccctggctgaagtgtcaccctattcaagaaacactgctgtcaggaacaaaatggggtccccggtgctccgaagtatcttctgaaattttcttaaaacaacttacaaaaaatgtttttgctttaacgttttacaacgtttaaggaaacatgtaaatggtctgtttctttatcgagatggtcgtcctaactaacagtgtacacatacataacaattcttccaactttcctcctcagagctaagcacttcactatatgtaaattataataaagaaaagattgtgcaagatcatgcaagtcgattgacttaaaatattgagttttaatccaggccctctgtttttctatttaacaacttttgtgtttggaccagactggtgaagcaggctatggaaattaacaaagtaaaaaattaaaagcatcttccttcgccatccctccctccaaaattaaacaacagtcgccccttcctgagcaggcttcagtcccaggctcgagttttcctgcgatcaccccacagtcacccacagcagctgttgctgcttctgtcgggttttcgtttctgccttctttgggtcgtctcttgtatacaaaacacaccccagttctctaactaaattcaaatacgaccccggcagaatttacacatttcgtggtgcatggattgtgtcggtgcaggggaaataaataccctctggtatttaaccactgagtctaattcgaaaaatcgggactgggcccctaggcggcaccccaggggctccaacctggcccgcgcctccccagaccttggcgctgagagcgctgcttttgcgggtgggtggacggagaggtaacaatctgctttcaacaaaaacctgtcgccaccgaatcgaaagcgaaagggaagggagaagaggggcagcttcccgcagcggccccgcgtctcgggacaggtagactaggaccagtacgcgccggctgcagctccggcggtcggatccggagtttgggggcgaggcgccggagtccctgccctgagtacagggaggctctctgcgtcgctgagaaacgtcggatctccaacccgacatgtctcctgtggcccaggcggcccgccctggactcgggcaaggaattcaggaggccaaagagcggacccagagtctggaggggagaatggtgaagtcttgggttgcaacagaagagggctcggtgggggctctttcgtaaaaacgcggtctccgcacccaaaggacactgcggagccgccttaatcgtcgttcttttagcacatttggggaaaggaaggcccaagttggggtagggacgcttgcagcccgggagggtttctctcaccaactctttccgcaacccggtccagacccggccagcagagactggaggcggcttccccgccccgcactccctcggcttggcccaggctcagctgcccggggcaccttccttgccgagaggcaattggactctgccgggagtgggcccagaagttgaggcccaggaagaggcctccgagcttcccccttttgttaggtgtagttacacacgtgaaagaacagctttcgccccgacctccagggctaggaatggttgccaggtctcagctgcctgcctgaagacggagatcagccagcgccagtactggcaccaaggccgcccctgcctccgactttcccaatgctcctgggagcgtctaaggatttttccttgaactccatttctccgcttttgagtatatacactctcacaactgtgggagagaatcgttgtcaatgcatgcctcagttttcctgcttgctggcagggtagggatcccactccagagtccctcctcctggctacttctgttaagggcagagcctcatcttttgtatcctcagtttctccatcttagacctaacgcgcctaatccctttcctagaaggaccagacatctcctggctggggagactcagctgctgagagagggaaagaacaaacactgacttgctgtttattgtttgtggctttgccccgagcagtgcctccatcttaggcagcatggagtggcgtcctgccggtagttacaggctgcctttggtcccagcctgcagtttatgacccagagcagtggcagggacttgccctgtcctcagaattgggtgctctcgagttcccagcggctcggagatagatagggatggaaatgtgggtgggggttgggaggggcaggggtagcgggggctcttgctcttgcctcttgctgtctctgcagaggcacatttatgacccagtaaggcctttctgttatcaccccaggatgcagatgaggaaaccggggtttgggaaggtgtttgctgtcaggtcacactgccacgggttaggggcagtagcgggtcaagtggctggccctttccgtcagctccaaaggctagtgcaagtagaggaagggccaggctggctgtgggggcccagcaggacacagagagagggctcaggggaggccaggcctctccgccttccctctggacctgaaggcatttaaccaagaggtggggagctccttaggctctcttcttgcctaatgtatcagcctcttcagaggtctcactggtaattttcattaaaatatgaaaattcaatgcagtggagagagagcatgagctctctggctatgcaggatgaacctccatgggtcccctagtctgcgacctgccctcacctaatagtcctgaatgacagggacgagctggggcctgcatccctgggctgggaaggacagccagtacggacagggctgagagtctctgctggcttagcacggaaagagtgcctgtatgagagctgtgtgtgtccatgtgcggagctgtgtgtgtctgtgtgtggagctgtgtgtgtccatgtgtggagctgtgtgtgtccgtgtgtggagctgtgggtgtccgtgtgtggagctgtgggtgtctgtgtgtggagcagtgggtgtctgtgtgtggaactgtgtgtgcctgcatgtggagctgtgggtgtctgtgtgtggagccttgggggtctgtgatctgaatgcctgatctcattccaactggaggtgaagaggaaggtggaggaagtggggaagggccactgaatctttctaaatcttctctcagttctgtcctatgggtttgggagtatgtggctcattcgaggccacatgggcatgtgttcttggggtatgaccacatcggctcctaaagaagatgctctctgcgtgtgtgtgtgtagagtgcaattgtagacaagcatatgactgtgaatgtttgtcagcagccatctatgaactagttctgcgcctgtgaaagaaggaacctgaatacgagaaaatatctgccatcggctgttttcccaaagttattctagccaccaaggcctccgccgtgtcccagcctctgtccccaggcctagtgcctctccatcagcctggatcagggcaaattccctgcccccaactcttcccaccagggccggacctgaaggccaaggcctccgggtatgtgctcaggactcctggcccagagaaggtttttccctttctgcgtctttgcttccccttccgctttggggttcaggaaccccgattctctggaagaagagaaggcctaggctactgagctgctctggctagagacgtccttgagtgtctctctctcccgggcaatggtggctgtgctctggggggcccaggcctgcctcctgtggctgcgttcaaggcagcttggaggtcatttaggccagctcccccgggttccccgtgggctcaaatcaggacccagacccttctctcttgccacagctctgggccacctgggactcgggacttcctgtctcccttcctactctgtcctaaaccattgttcagaggcctgccgcctccaagaatcgccgagggagaagctccaggggaactggcctgcccgcatccccactgccagtagcgctcagggtcccaggactcgggtcttgccagaccacagtgtcccctgggaccctagggtctctggctccgcactgtgttgcgccagtgcgcctggatttcccgtgagctttcggccaaccacgctccgggcttcccgcctggctccgcacctgcggcgctctcacctgcggcggcgccgcccgaggagcctcccagccggcgaggagcgaggcttctgcagtcctgctgtcccgcagccccgcagccccgcagcctcgcagccccgcagccccgcagccccgcagccccgcagccccgcagcccagcgccagagcgctgcgcggagactccttgccgccgcacgccctgggccggtaagaagcatccgcttcaaatcccgcccagcgggcagcgcaaagcgagcggtttggggaaatgccgaagggaccgggaaaaacaaactccaagtcgagtttaacagccgaaacgctccgtgcctaggccggcggacaagaaggagacagaacagatcccttggctccctcgcagcgatcgatcccgtttaccgaccagagtcaccaccccgcccccagcccgccaactcatacctcccgcaagccaccagtttcaagggatgcggaagccaagcaccccgtggtccccagcaccaggtgacccgcacgtgcactcaccgtagcagggaacctgcaaggccgcgctgtggccgctgctgccttcctggagtttgaggctgccgtccgggggcgtcttgcaggcgcctcgctgcaagtaaagatgcggttgcgcgggcggctggggctgcggctgctgctgctgcggctgcggctgcggcggcggctggggctgcggggtcgacggctggggctggaacttgttaaaggagccccgcgccccagctccactctccaggggtgtcgccaggtcctgctgcccagcgccgtaacgggcccggctcttggcgtccccgaatccctgtgctttggcggcggccgacaggaaagttgtgccgaacttgtcgcctccgggaaatgccctaaaaggcgacgagccctcccgactctgcgacaccgggctgtagtaggcgtccatggcagcggccggcgactcgcagtaagagacgcaagtctcagcattcatgcctggcttgcgcaggcggcgggcggggacgcgagcgagggcgcgaggacgccaccgcgcgccttggctgggagtttggggaggcgaggaggctgtggctgtgcactccttgcccggcctgctcgctctccctcctcccctccacgccggcctctctctctctccccctcttctttctctgtctctctcctctctctccctcctctctctctcttcccctccctcccccccccttcctctctctctccctctctctctttcctccctccccacagctagccgagggaaagaacggagggcagtaaaaagattcagatgtttcggaaagttgaccagatctcccaaaccctcttaaggttttgcagcggaaaaaaaaaataagtaaatttttttccctgccttgcttcttcctttccccctctctcgtcccctcctcctctctccttccactggcccctgccccctcctctccactcttaaggagatgctactaactcgctagcggggattcaacccggaggcgcccgagggcttttccgattctaggcggggctggggagatgccaggatccccagggctcccgaggctaggctgagaattggcggggtgtcggagctttgccttagggcaaagggaaatgcaaattttaatgacaggttaaaaaaaagccccccaaaataaacctaacaggttttgacattcgaagccagggggaccacgggcctgcggatgcaagcgagtcctacggactcctgcgcgcgagctcgcgggcgccgctgcgggccttcccgctggcaccttttcctaggtttccaaccttcctccccattcccgttcctacgggagattaacacacacacaagccttcgtcgtccagtgcatggtcacttgcacgtcttgttaactatttccctctgctgtaagggcgctgggctgggatgtagcggaatctgtgctccctcaagccctggagaagccctgggctgggcccggcttcagaagctttagagcgctgccctctgcgctcccgtctagaggccgcaccgttcacgccccacgtctgcgcccaggcgaggggatttcctgccaggcgaagtacagagagcggactctggagaccccctgaccttgcccgatagtcgcgctgtcacctgttcactccttggggtcaggggtcggggagaggggtgagaccgtctcttccctttctggcctcactgcccccgactgtaaaacgaactgcttggttttgataggttgtggtttcaccaccactgcgagcctcaaggcccctggcaccgccacagcaagggaaaaaactttgcgcgtgcagcccctcgatttcgcttcatgacaaccgtgctagagattggcgcccccaattttctgatgagctaacggaggctcagagaggggcggccacctggtccaggtcacacagctgggaaatagccgtcgcgccctggaacctctgctcaggctagtccctccaccgacctggaaggccgtgcggacagcgtagatgcagaggggaaactggcccccggctgtggaatggttcaagttgaaggagaccagcgagagcagccttccttaaaccgctgagaaaatcgttaagcgagaacgtacctctagggagtctgggagtagggtgagaggtaaaagtgcaaggtaaaattaaagagggcctgagcaccgtgaaccaaggaatgtgggtcagatgtcaactttctgcatctaaggtctcccaaagaaaaaatatacctggggggtcgcgcttctgctcccaatctcatctgggctaattcttacccccaccctacccccttagtatctctggtccttgctccgccgccgaccgcgcgatcccacatctggtttccatcgccggcttaccttgaagtgctcgttaataaagatattccgcaaaccaagccaggagcgcgcaggctccagccgccccccactccatgcccaatgggaaccgcgcctcactggcccgcagacctaagccacttgagagtcctttatttattgagctcctgttgtgccaacaatctggcaatacaaggcttatcatacccattttgcatatgggtagactgagactcaaccaaaataattttccagttagcaaaaagcggagtgctcctgccatcatcctaaatgctcctgtccagcggtttcttcaagttcctagaacctgccaaggtctctagcctgtgcactgtagcataggtggtttcccctacctggaattccctaaactcattcctgcacttttgtctggctaatgattcagagttcagcctagagcatcttcctctaggaagacttcccgtctctcctagtttaagttgacgcttccgtttgcctcatctccgtcccagatctcgtggttgtctggttgcctggctatgagtgtatctcaaccccactagttgccccagggcagcctcctacgtgcctggcaccccacaaatatttgtggaataaaagattaaacctggaccaggcgcggtggctcacacctgtaatcccagcactttaggaggccaaggaggatggatcacaaggtcaggagatcgacaccatcctggctaacacggtgaaaccctgtctctactaaaaatacaaaaattagccagacgtgatggcagacgcatgtagtcccagctacttgggaggctgaggcaggagaatggcgtgaaccagggaggcagagcttgcagtgagccgagtttgtgccactgcactccagcatgggcgacagggcgacagggtgagactccgtctcaaaaaaaaaaataaataaataaaaataaaataaaataaagattaaacctggggctgtaggactctatcacctcagtgtattccaactgctcagtgcagcaccaagttctgagactctttctttggtttcccttagtcaaggacagctggtcacccacccaccccctcttcaaaaatcaagtagcggaattaacagcgtgctggaccttc

SEQ ID NO: 2 - DNA, 221909 bp, Homo Sapiens
aaaaccccgtctctactaaaaatacaaaaattagccggttgtggtggcgtgtgcctgtaatcccagctacttgggaggctgaggcaagagaattgcttgaatccgggaggtggacgttgtagtgagctgagatcatgccactgcactctagcctgggtgacagagggagactctgtctcataaataaataaataaaccaggtgcggtggctcacacctgtaatcccagcactttgggaggctgaggcggggggatcacctcaggttaggagtttgagaccagcctggccaacatggtgaaaccctgtctctactaaaaaagaaaaaaattacaaaaaaaaaaaaattagccaggtgtggcgggcacctgtaatctcagctactcaagaggctgaggctggagaatcacttgaacctgggaggcagaggttgcagtgagctgagatcgcaccattgcactccagcctcggcgacgagggcaaaactccctctcaaaaaataaaaaataaaaataaataaataaaaacaaaatttgaggcttaaacaattaagcttcgtgcatctctttaatttttcttttttttttttaactctaatttcatgacagattaagcttcatgcatctcaaaaatgtgtagaaccctcattcccagccttccctccctctctcttgtccttctttctgatttcttggaatcggaaggaaaattcggatatccaggaaccatcacacaggaggcacccatgtgatgtgtccaacatcactccacgcaggtgtccttgggtcctgggtgcccaggttcctgtgaattgtgaccccaggcagaagcgtgagcatccgcagaggaacccacctacccaaagccagggaacagccagggctggcatcctcagggtgactgtgctccagggcacctctgacttgtgctgagtaaaatggacaaagccagcaatgcacccataacccagattcttgagacaccgctggactttgggaatcccaggcattaggctcgtggcagtgtcatcatggctaggctgggggcagtgtcatcatggtgcttgctggccaagtcaggacacggcctaagccggaatctgctggtgctggtacaagcggtgagtgggcgtgtgggtgggggttgcggttagggtgtggacatcccagaatccaggacgctgttcacaattcgtccatactccctgctcccctcccttacagcacttccctcccgaggcctcctgagcctctaacccccagataaggaaaggggtggactcagttgaagtccagtgtccactccggtccaatcagctctacctggggtgaggggaaactcctctggctgggctgctccctctgcagggctgtggctggacagattactcaagaaaggaagcaggtgggccggaacgaacccacggtgccacataggcctccgttctcatgcatataagtttcccacactcaggcaggaaatgaaaatgcttcttggacccccaaggagagtaaaggagaggggaagaggaggaggatttttcggggctgttagtgacactttcagcctcctgtgcatttttgggagggctgcaggagaaggcaatgctgcgcccctacccagaactagcgagcgcttcccaactggcctcccgccttcctctcgtcctctacggcctccattggcagctgtgcaagggcccggccctgcctctgtctctccacactcgctgtgatacctcaggcctcccaggctccgccacgcccttccctctttcgggaacagctgccttccatcaccttggctgcctggctaattcctgctcattccttaaaaccctgttttgatttcgcctcaataaaactctgacaccaccctccagtcataattagtcacttcttcctctgtacgttggaaacaccgctttatcgtggagactttaaggatatccaagtagagagaattcttccgtgcaagttttgcatcctctcaccactgcctgcgttacccgagttgtaaagggcggctccctgtgtctgccccgctgcaccgatacaccgagctgcgcacggtgcccagcgcagggagaacaaatgatcatctgtccaacgcgcccatttacaggtgaggaaactaaggctccaactcaatcgacgcactctgcccttttgattaccagaaaagtagcaggacaggtgtcctgtcccgccctaccccggcccactaagccggcaccccggctccgacccccggctgtgcccggcgccgccgcggtgcccggcgccgccgcctcgcccggcggggccgcccggagcgcccgcacctccgcccgcttccacctggccgggcccgccccgcccggactcgggactgggaagtgcggcgactcccggaaccagccattggcgccagcgcggggagctgggggtgcagagctgcgggcgcggcgggccacgcaggcggcccccacccccggcctggcctggtctggtctggtctgcgctgccgcgcgggggcgccccctcccaggcccggcgcccgccagccccgctccgccaggtgcagcgcagcgcaggggtgggcgggggtggggctcggcgcgcacgttcacggggcggggagggggcgggtcaggggcgggaccacagccggctgggccggggttctatgcgcatctccggggaggggcggggcgggggcggggccggggcggggcccggtcggtgcactccagacggcgggccgccccctcttcccgccttcctactaccggcccaggattagcgccctgggagcgcgcgccccgctgcctcgccgccacactttcctgggagcggcggccacggaggcaccatgaagaagtcttactcaggtgggcttcgcgcccggggtggggaggggtcggtgtcccgggaccagcgctgctcacctgagtgcctgcggccgggagtggcgaggcgcccccggagctgagcgagtccccgcggcgggcacactgcaggtcgagttcctcccaggacagggccgctgtcgggccgctttcgacctgagccgaccgtcccctgcgctgtctccagcccttgctcgagtgtcggaggggctgccctgggggacgctccctcttcctcgccccttgcaccctcgcaggaatcgctgactttccaggtcggccgggtgctttgggtccctgtgcgtctgtgtgggtgaatggggtcggggctaggtggaggggtgtccttgggttcagcctctagggctggtggtccaggccgcagcatcctttcttcggattctcttcggtttctcctctacttagtggggcacgggacggcctccagatgggaccgtccagcagcgcccaaacttggcgactcgggttcacgttttgcgctcaggacgccgcccgcggctgacatcctcactccaccctagcagggcccgccttaagtaggcgaagggggcctgacttgggcctcaccatgagccggttcaggagctttcatttcataagaggctcccgctctggcactctgaagttccatttcacagatgggcacaccgaggccacaagggcaggttaagagaaatccagatcttcattatttgtcttttccttccttttttttttcctttgtggttttctccaaaggatccaggcaggcaggatcctttgtcctcctcagtcctcaaattataaatagcgtctcctcttctaaatctagaaaccgtttgtttaatgtccctcctttaattcattcagatagaaaggtacctgccaaggatccatgaattaatttttattgataggagaacagaatcatgggccttagttggaggtgaaggagtcatcggggccatccccctgcctttgggccattgtcggtttcctctggctttccatatttaggaaccaaaatgagtgataaagtaccttgtctcaaagaggattactcagaacttccccgaaaatacccttctgggtcagtagcttagaatttcaactttcacccggttgttgcgaacaagatggccctctacgcacccggagcacagctctgtcaggagcgtgggtgggttggtgtgctggtgggcgggagcgggcttccaggtggcacatgcttggttttggcaccggggcttcctccccaacatgctccaaatacttgagattgttgtggggatcgcgcggtgcatggccctttccaggggatctctagcccgcccagggagggccctttgcccttggtttcttacactttacctcccactggtgggtccagacagtgggggtgaccggggtcctcccaggtcgtgggtcctgggttttttctgcggagaccctcctgcacagatgccggaagggccctgaggcaggcttggagtctctgcacctgcggcttactgggaggtggggagaccatcacttgtccttttctcctctcctccacacacacctaccccacccctcactgggtttcttttttttttttttttttaaaaaaaaggacagaaccttttgcagtaggtggaagtagagtttgtggagtgagcaggaaccaactcttgtacagcagcctcggtgcctccttgtgtttacctaaaggggcaggcccctctgaggatgggggaagggagggctcagaccatttctggtttgctccctgcttggcagtggcccaaggtgtgctgggtcactgtgttgcagttgtatggagtgggactggagggggctgatggtgggggtggcctcttgccctcattctgagtgtcctggagctgtcttggcaccagcccttttccgggtacgggcactcgcaggagtcaggctgaccccccaacaagccatcgacaccatgaaattaaggaaagcagcaaaagatgttaaaaatcccccaaggctctgacaatccaaggacaacaggaaggtctttattttttcatctagactgtgcgggattattgcttccagacctgtatgtgggcttcagaataaacggaatgaccataatgttgttcccggtagacctggtttgaacattcgtgagcctctgaaaaggagaaagattttagaaggatgtgttggggcaatctcaagtaccgtgggtctatagacagtcatcgaagacactttatgtgctgggcacacatggccaagtctgagtgggtacagaaatggtaatgagatatagtccttgcctgcagagaacttacattctcaccgggagtcaggatgagggcgagacaccagctcattaacacccttccctcctgagcagttcagcctccaaatactacaggaatgccccggaggttttaggtggaggtgagattgagctgggccttgaggaaggagaagtcttgagtagtggagaataaaaagggacttggccaggtgcgcttgaagtcccagctactcaggaggctgagacacgaggatcgcttgagcccaggaggctactcaggaggctgagacacgaggatcgcttgagcccaggaggctactcaggaggctgagacaggaggatcgcttgaagccaggagttcaaggctgcagccctgtgacagcgcctggaaatagacacggcactccagcctgggtggcgtcatgagaccccatctgtaagaaggtcttttccaatgcggaaggcagcaagggcccacacagggcagctgcaggatccagggggacactggggacaggttctctctggcagctccactgctgctccaggctttcccgattgcctcacccggccttccaatggggtggaggtagtggtagtctacaggcagtgtggtccagtggttacacttgggggctcagagccgccagccccttgggattaaatctcaccaggctgcgcctctccctgtggcacaaggttctcacctcatgcatctcatttgcctcatttgtttttttgtgtgtgtggtgttttttaattttatttatttatttatttttgagacggagtctcactctgtctcccaggctggagtgcaatggcatgatctcagcttactgcaacctccgcctcccaggttcaagtgattctcctgcctcagcctcctgagtggctgggattgtaggaacgtgccactgcgcccagctaatttttatatttttactagagatggggtttcaccatgttggtcaggctgatctcgaactcctgacctcgtgatctgcctgccttggcctcccaaagtgctgtgattacaggcatgagccaccacgcccagcctgcctcatttgttaaatgggacagtgctatgttgttgtaaaggttaaacgagttcatatttgaaaaagctgagaaatgcctgctctgtaacctgttagctgctgtcatgatcatgattgtcattgacaggaggatggagaaggctggggttacgccattgctaggacgttccagaagcctccatgatcttcccttactgtggtcagagcatggtgcagggtctctcccccagcccctcagcactggagccagctgcactgtacccgccctggctctctaggttctgagttttgggactccctttgcatactaggtcacatggaacttgccgtcattcccaggctcccctggaaactctctgtgggtggcagcggcaggaggacttacccgaggccgatgagccacagaagcgggactgaggttgcgtcacacccctactggcacctgggaattactctggagattctttttttattttttatttttttgagatggagtcttgctctgttgcccaggctggagtgcagtggcacgatctcggttcactgcaacctctgcctcccaggttcaagcaattctcatgcctcagcctcctgagtagctgggattacaggcatgtgccaccgtgcccagctaatttttgtattttttagtagagatggggttttaccatactggccaggctggtctcgaactccggacctcaggtgatccacccgcctcagcctcccaaagtgctgggatcacaggcatgagccaccgtgcccagccactctggagtttctctgtggctttcaggagattcctgaaggggcaccagccacgattaaaaagctctatgctgtcgtgacttctgagtcctgggcagggagggaggctgcacccacacaggaagcagcttctgccgtgattcagtgtgctggctcgccgtggtggacagggctgcaccctcacccagcgccccgggagctgacttacgggaagggcaaggaattgcaccctcagagaacacttccccagtcagctaacccggtgacaggcgagcgtgggaagggcacaagcacagggtttcttcctcttctcccccagccccgtctccgcgcctgttctcgctgcctcttgcctcctcacgtccaagcttgtctgctctggcgcattcaggggacctggactggagagaaaaagccacctcgtacggttagtctgtggctctgtctgacttgtgtcctccgccgaggcccctcagttgtgagacagctggctgagcctaagtcctggggccagccctctccctagtctgttgcaaaggtagaaaggcatgcccaggcaggggccacctgccctgcccgctcacgccagaccgcaggcacttgcccgtcagatctccccggcctgcccagagggattctgatagccgagggcaatgcacctggcagcggagcattgcgtttgcgacagtccaccttcttcctggaaccaccccccacaagtgtgaccagctcaagccaggacaggtacagggggacccaggattgccacttaggggcagtggtctggaatccaggtccaggtgacatgggagccaaccctctgcttggagatcccaggtgggtgtttgcagaggacatctcacttgaggacccatggaaggggacacttcccaccccctacctggtccttgggctgccctcctctgacactctcctgccatcccaggcagccctgacagccccatgtgactgggacctagaggtggcccctgtttccgccccagtgtttgtccacaggcagtgttgcgtgggctctgaagtttgcctaagatggacctgataaggggagttcagtacacatcagtgcaggcccggccagggggtgatgatggcagttcctgggcagatccagctggctttagggtaggaggggctccagagagaggctccaggcccctaggggtgtgaacctttggggtgaggcgggaagtgacgcgctgggttcctgcgcctctgtttgttggagctattaccttggaaacatcccagctctaggcggttgccagggatttatggggatcagtgggtgccaatccctgggtgaagccctcggggcttgtacacagcacacagcgctgtggccccatggctcactttgctgtgtgaagtggctcagtctccgggagagtccttagccaggcaggcctgacggcaactgccaggtcatggtgatctggaatcgctgaccaaagggagtcagtcctggtgggtggagggacttggtgggcagccatcgtgatgccaggcatggggatcgtgtgtcacccaggcctgtgggtgccgagcttctgtgggagcagtgaagtgcccccgtggccgatgggctggtcacccctgcccctttcctgatgtgacagttgtgcctgggccccgggaaatttgccaggaggcctggcattggcctgctctactggagcggccctgctgagctgtgagctgcccgtctccctgaggttcctagcccatttcaactctccatgtggatttggtcattcattccagaagcgtctgccgggcgctgctgagtgtcaggttctgtttgcctcctctcctgtacgctggaggctctgggcaccagctctgcagggtggcctggccttgggtctccagggtagagcatggcactctctgctcccagcccagtttctctctgctttatctccctgaccccaccctgggcatgggcccatttgcagcccctgtgaagggagacattgagctgttgctggcagaggaggggcggctcctgggcactgcttgccaatggcctctcggcagctctgtgacagctgagctttgttcccagcctaatctgacctggttctccaaagcatgactgttggcagcctgaaaacctccaggacaggaaacaggagtggcgcagggaatgtaagatgatcccagcttcaagtcactgggcggcccttagacccaggctgcctgctgtctctggcaggaactcaagtcgctggtcatcctcagagcggtgttggcccggggccttcagtggcctttgtgtctgggtgagaggaaccctggatggccactctgccctgagtgtgtgggtccccagaagtgctgggttagggggcacggagggccagaaagtcccctttggagcgctggactctctcgctgactcctaccccaccccggcctggggtttcagagaaggggtccaggcaggagtgtcatcttttctcaatggggatgtggcttcagtctctgtccaggtgggtgcattgctctctttccggctcctcccaggctgcttaaatgacctgtgacgaggcctgcgccatggccggggccctctgcttttcccagcgctgcacctgggaaccaggggttgggccccggaagccgaggatgtccctgaatgccatgcctgggcacctgtcctggccaggcgaggcgtgttggggcagcggctgagatgggagcagcagcattgcctgccaggtttgagatgggccccgggtgagtgtggttaccaggaagggctgggcagagcaggcgggtgggccgcccctggggccttgttccgcagatcaacctgatccgcaccctggggccggggcttcctttcacagccttcccatgaactatggctcctgtttccatcccaaatcagatcccagaagaggaataatgtccatgtaacccaagccagttggaagtgggttacatccaacccctgtcatcttccagcttgttaaggacttgactaactcaacccagagggatttggagggttgtctgcaaaacccactaataacagggaactttagctctgtagccacagggtctacagaggtgtcgggctgtcgggttattgctgggaggtgagccggtggcgtagacaccatggaggcaccggtagtggaagagctgcaagtgcacacagaggccggcaccgaggggcggggaggaggaggtggtggatttctcgccagtgttggcatcatgttgcctccagcatcagagacccaaggtgtggctgaccttggctggggcgatgagtcattggatagcagagccttcctggtagctgggggttaacgctttaactgccgggactttgtattatgccgcttcttttttttgttttgtttggtttggtttggtttggtttttgagacggagtctcactctgtcacccaggctggagtgtggtggctcaatcttggctcactgcaacctctgcctcctgggttcaagcaattctcctgcctcagcctcctgaatagctgggattacaggcacgcgccaccatgcctggctaatttttgtatttttagtagagatggggtttcgccatgttggccgggttggtttcaaactcctgacctcaggtgatccacctgccccggcctcccaaagtgctgggattacaggcatgagctaccgcgcccagcttgcatttatgcttttttttttttttttttgagatggagtttcgctcttgttgcccaggctggagtgcaaaggcgcgatctcagctcactgcaacctccacctcccgggttcaagcgattctcttgcctcagcctcccaagtagctgggattacaggcctgcgtcaccatgcccggctaattttgtatttttagtacagacggggtgtccccatgttggtcaggctggtctcgaactcccgacctcaggtgatccgcccgccttggcctcccaaagtgctgggattacaggcgtgagccaccgcacccggcctatgctttttattattattatttaattttttaaggaaagcaatctaaactgtacactgtatcttttctttctcttttgctttttgttgtcagttttctgtattacttattgccaaacaacatgaacaggaaattgaaaggaaaacttcaacaatcattggctgtagcatttcttctgtgttccattcagtgcttgtctcctcaggaacatgacatagggtttgatttaattatgaaaggcgtatattttcagagttttatactccccatagaatgaatgttgaattctgttcttttcacttgaaattagatctcaggcatggatttcatgattatcactataatggctcttcagagtggacattgcatcttgtagggaaccaccctctccccagctgctggtgtggacgctcctccttgatggtgtgggtctgggcccctgaagggtggtgtcctgagtaaagatgttacagtagccatgcttatagctttgggcctggggctaggtggagactggcttcaaccctagagcttgctgtcttaaaataaattcttttttttttttttttgagatggagtctcgctctgttgcccaggctggagtgcagtggcgcgatctccgctcactgcaagctccgcctcccgggttcacaccattctcctgcctcagcatcccgcatagctgggactacaggcacccgcccccacgcccggctaattttttgtatttttttagtagaggcggggtttcaccatgttagccaggatggtctcaatcttctgacctcgtgatccactcgcctcagcctccaaagtgctgggataaaataaattcttagggccgggagcggtggctcacacctgtaatcccagcactttgagaggccgaggcgggcagatcacaaggtcagaagatcgagaccatggtgaaaccccgtctctactaaaaatacaaaaaattagctgggtgcagtggcgggcgcctgtagtcccagctactcgggaggctgaggcaggagaatggcatgaacccggaaggcggagcttgcagtgagccgagattgcgccagtgcactccagcctgggcgacagagtgagaccctgtctcataaataaataaataaataaataaataaataaattcttatacccacttgcattatttattattattattattaaacagggtcttgctgtgttgcccaggttggagtgcagtggcgtgatcatgacctcccagtctcgacctcccagtttcaattggtcctcccttctcagcctcctgagtagctgggactacaggtgtgcgctgcatgcctggctaattttttttttttttttttttttgagacagagtcttactctgttgcccaggctggagtgccgtggtgcaatctcggctcactgcaacccccggctcctggattaaagcaattctcctgcctcagcctcctgaatagctgcgattacaggcatgtgccgccacacctggctaatttttgtatttttagtagggacggggtttcaccatgttggtcaggctggtctcaaactcctgacctcgtgatccacctgccttggcctcccaaagtgctgggattacaggtgggagccaccgcgcctggcatgcctggctaatttttaaaaaatttttgtagcagccgggcgcggtggctcatgcctgtaatcctagcactttgggaggccaaggaggtcgggagttcgagaccagcctgaccaacatggagaaaccctgtctctactaaaactacaaaattagctgggcatggtggcacatgcctgtaatcccagctactcaggaggctgaggcaggagaattgcttgaatctaggaggcgggggttgcagtgagctgagatcgtgccacggcactccagcctgggcaaagagagtgaaactccgtctcaaaaaatttttgtttttgtttttgtagcgacagggtcttgttttgttgttgcctaggctggtactgaatttccagcctcaagcgatcctcctgcctcagcctcccaaagcgctgggagtacaggcgtgagtcactgtgcctggcctccacttgctttggctgcctttctctgtcttaggtaaccatacatttctccaggtaattaagaaaagattgcgcatgatgagtcccttttctggtatttctgggattgcccccaaaaccagacaagtgttcttaccttgacattttattaagactttaatgaacagaatgccgtttgccctcagtctgctggtccccctgcgaaggcccagggcttccttgtttgaaaagtcatccccttgtcgaggtctttgattccttttcaccacggcagtcatgccgagggtccacagagccaccccttccccatctcttcctcggcccctcaagacgcatctgtacccccggagatgtctctttgttttcttgggccacctctcctggccgtcactcaccctgctgactcattacttgtgcaacagtttcttctggaaccctcaggctcctgccacctaccctctgcagtccccgttttgttcctcttgcctcagtcttcctccccatcacccctctacctgttggtctccatctctgtctatggcacatccctgtgttatactctgatggctggataaaggttgagtgaaacgcatctacccctttggtgactggggtgcccattaatcagaagggatccaaggctggcgtagccttttcccgcatcctggggtatcgtcctgtggctcttccttgttggagtctgcagttttttgtttttttttttttaaattttttgagatggagtctcgctctgtcgcccaggctggagtgcagtggtgagatcccagctcactgcaacctccgcctcccgggttcaaccaattctcctgcttcagcctcccaagtagctgggactacaggcgcccgccaccatgcctggccaattttggtatttttagtagagacggggtttccctacattggccgggctggtctcgaactcttgacctcaggtgataggctcgcgtcggcctcccaaagtgctgagattacgggcatgagccaccaggcccggccgttgagattaccttcataagccaccaggcctggctgtagttggcagtttttgaccactggtctcgctccacgtgatctgtgatcttccccttggccccctggccctgccctgttcatctgctcacctttctcatgcatgcggtttgttcatagggtatgtaatggggtctaaccaggaaatggaaaccgcttgagcatttatttatttatttatttatttatttatttatttatttttcccaagacaaggtctcactctgtcacgcaagctgaagtgcagtggtgtgatcacagctcatggcagccttgaactcctgagctcaagcgatcctcccttctcagcctcccaagtagctcggactataggtgcacactatatgcctgcctaattttttcttttatttttgtagagacagggtcttgctttgttgcccaggctggtcctgaactcccaacctcaagcaatcctcctgcctcagcctcccaaagtactggagctacaggcatgtgccatcacgccttgctaatttttgtattttttgtgtgtgtgtaaagacaaggtcttactatgttgcccaggttggtcttgtactcctgggtttatgtgatcctcctgcctgggcctcccaaagtgctgggattacaggcgggagccacagtgcctggtccacttgagcatttagaacagaaggacttaaaggcggggaactagttacacagatgatgggagaggtgaaggccagacagggaacagagaggcaatcagcaggaaatcaaagtggtgtgggcttatacagccctctaaaggtatggatgcaatgattcatttagaatgagaaaataaataacagcaaattataaattataagcagctgttaaatatcacaaacatcactacatgcagaagagtaccagtcaactgtcagtcatatctccaaagttctatttctcccacatttttggcattacttcttcaatatgatgactttgtaatatcgttttctatttcgagaacagaaaactgatcaggctggacacagtggctcgtgcctgtaatcccagcactttgggaggccaaggcaggtggatcacttgaggccaggagttcaagaccggtccgggcagcgtggcgaaaccccgtctctactaaaaatacaaaaactagcagggcatggtggcatacacctgtagtcccagttacttaggaggctgaggtgggaggattgcttgagcccaggaggtcgaggctgcagtgagccgtgatcatgccactgcactccagcctgggtgagagagtgagaccatgtctcaaaaaaaaaaaaaaaacaacaaaaaaaaacataggctgggcgtggtggctcacgcctgtaattccagcactgtgggaggttgagatgggcggatcacttgaggtcaggagtttgaaaccagcctggtcaacatggtgaaaccccatctctaccaaaaacataaaaaattagccaggtgtgatgacgcacgcctgtaatcccagctacttgggaggctgaggcaggagaatggcttgaacccaggaggcagaggttgcagtgggccaagatcgtgccattgcactccagcctgggcaacagagtgagactccatctcaaaaataaataaataaataaagcgaatgaatctccttagttgatcaaattttgtttttatttttggtagttgggatgtatacaaaagtggcggtcaacatggagttggtggtgctgctacaattgttttgttcaagatacacaggaattctggtaaatcctgtttttttctttttttttaaatgtgattcccatcaagaaagaagtaggaaaatgggggagatttctaactgcatatgaggcatttgtgcatgtatttctgaccagagagacttttctgttttgactccacattgaaggaactgaatcctttgcttacaacttcacctctggtgatgggagtaattttccacagatttgcttctggacccgtgcatttcaaatcttgcttctctccactgcgcacgtttttccggcgccaggcaccgcaggatatgttcgtgtcttgtgatttttgattctgcgcggtaggtggaattggaacggtgagtggagcgagtattgctggaatccgtttccacaccgggatagcgagcagtaactgaactatacatggaaataaatgggaactacataaatataacccgaccaaagccaaactaaatatctttccagttcaacttctccttagcaggagcccccacgtggcagcaagcctccgtttccacctcacacaagagaaaatgtgacgggcaggaactcaagactggaaatgaacggggacgttaattgattgtagggaaaatattttccattttgtaaattttacaaaaaatgtttgaccctgtggacatgtggttagggcccttctcagtgccttgagagggaaccatgcaggtagagggagggttcttagcattgtgggggtgacctggagattggcagcagggtgccaccaccacccctaggtggggatgagagggaggaagtcctgtgaccagagtccaggggccagagtcacctgctgggagcccaaacaaaggtgggactctggcaggagctggaactacacagaggaccacctctcctgctggagaagctgtctgaggcagaggaggtggagagctcccgcgccctcccttgcttccacctcccaggttcctcccaagcctctcgttggttgaacccagcccaaagccagcaggcctggggacctggacacctgagccagcagaggtcggcgtttctcccacacaaaggagggcacaagaagtgggaggcacggagggggatcaggccaggacccacacaggatgtgcaaacaggagctcccctctcttcccaccccaaatggcatctgcagccggcctcacttccctgctgttagacaggaagaggaaccttgttcccggcaccagctgcccccaccgccccccaccccacggaggcccctttcctctctggcctttgcttgcaatcattggcgacgctgatggaccatatcttctggggagtttggtcatgaacatggtttcccatttgttgtggaccaaactgtgcccttccccttgaattcctgcgttgaagccctaactcccaatgcagctgtaattgaagatagggcttttagggaggtaattaaggttaaatgaagtcatagggcaggaccctaatctaataggattgatgtccttataagaagagggagagacaccagagatctctcctcccccctcacttgtaaacagaggaaaaatgacggaggacacagcagggaggtgggtacaagccaggaagaggggcctcgccgggaactaaccctgacggcaccttgatccgggactttgggcctctcaaactgagaaatacatgtctgttgtttaagtcactccctccacagtaatctggatggcagcctgagcttaccaaggcaccgtctgcatcagccagggctctccagggagacagccaataggagatggatggatggatggatggctagatagacagacaagcggacagagagagagagagacaggcagacacagacagacaggcagacaaatggctagatagacaagcagacagagagatagagacagacagacacaaacaggcaaacagacaggcagacaaatggatagatagatgatagatagccaggcaggcagatagacacagacaggcagacagacagacagacagatgataggttgggttcagtgactcttacctgtaataaccagcacattggtaggctgaggccggtggatcacttgaggccaggagtttgagaccagcctggctaacagggtgaaaccccatctctactaaaaatagaaaaattagctgggcgtggtggtgcatgtctgtaatcccagccactcgggaggctgaggcacgagaatcacttgaacctgggaggtggaggttgcagtgagctgagatcacgccactgcactccagcctaggcgacaaagtgagactccatctcaaaaagaaaaaaaagatagatagatgaatggatagatagctagatagatgacagatggatgataggtagatagataattgataaatagatataaatgaccgatggacaggcagacatagatacattgattaggtagatgatagatggatagatagaagatagatggtggatgggtgggtagataggcagatagacagttagaaagatagatgatagatagataggaaggaatttattaggggaattggctcataccattgtggaggccaagatgtaccacagaaggccgtccgcaagctggaggcccaggaaagccagtatcgtggctcagtccaagtctgcaggcctcaggactgggaagctgttgatgtaactcttagtttaaggccaaaggtttgagagcctggggaactgctggagaactgggagttctaagtccaagggcaggagaggaaggcatcccacctccaggagaaagagggaattcaccttttctctgcctttttgttgtctggcaatggaatggtgtcatccatattgagggaggatctttaccactcagcccaccaactcacatgcccatctcctccagaaacaccctcacagacacacccagaagcgatgcgttaccagccatcccttaatccagccaaactgacacctgccgtcagccaccacacaggctcagaagaatcgtggttgcatggtgatggtctccatcccgtctaaagaagttgaagatgaactgttggcacaagccatcgttctttcaggctccttccagtcgttcattcttttaaaaatgtattcattgagcacctgctgcatgccaggtgctgtgacaagcactggggcacagcagtgagcaaacaaggactcttgtttcttggagtttacatgcagtagaaggaaacagaatcaatgaattcatcagttctagaaactatcaaaataggactaagagctgtggtgagaattaagataaggtgattgcatagaaagtgactgatggctgctttggaatgagtggtgaggggtcacagagatgatgacagctgagttgagattgggaagacaggaaggagccagcagtgcaaggactaggctggaagcaagcttggtgcattccaggaacagcaaggaggccagaggggctgcagtagagcaggcgaggaggaggagggagacgcaggtcaaagaggagcctggggccagatggaggaccctccctccaaagctcagtcatttcctccttaaaggagaatgtgttacctccaaaagtcacatatgccagcacagtgtctggctcatcatatgccttcagtaggcggtgagcatggctgttcttgttattactacatcacaattactaggaataatggagtcaccaggctttgcatttacagcaatgtgagggagtcagcaagcttccctggggaacccatctcccctcactaagttcataagagcctgataaccaggtcaatgtagtgagagctatagctgcccagtgtactggactctttagccacgggccaggacactttcatctcagcagaaacctctaaggggactggggagtgtgctgtggatgtttctgggttactcagacctcctggggagccttccccaccgcagctgctgcagggagctcagctgcagtgatgaactgcggctcagccttgtttatgggaaaaccctacatgggagatgggacggtttcctgttggttctctcggcctcaggttgctttcacaagtgcagggattctcacctgggtgtgtgaatggggctcaggatgccccaagggtatgtggagatgggggtcagctgtcttctctgatgcctctgaacctcctccccctgcctttctgcatctcattgcttcctggcctctctcactttgggtgctttggaacaacatgcaatccaatacacaggctgactttattattttgttttgttttattttattttattttggaaacaaaggctctgtcattcagcctggagtgcagcggtgcaattgcaactcactgcagccttgaacttctgggctcaagtgattctctcgcctcagcctctcaaagtgctgggattacaggcatgagctgctgtgcctggcctaggctggctttaaaagctcctcactctctctgcatcctgatgatacctacctcctggagcaggctcccagccattggcttcggatactttgtagctattattggccagttgtggcatgtgaagctgaggctcaggagaagggcagtcctgtccaaggccacacggctcagtgctaacactcagacttcagtgtttttatctccctcctggtcgcttccacccttagtgcatctctggaggcccaagggagctaaaggccaggctttggtcagctaagaatttaaaaaagctgtctctgtgctcctctgtcaatccatcactccattatctcccccgacaatgaattcagtttgaatttcagataaacaaggattaatttttagtataagcatatcccacaacagacttgggatatacttatgcctaaaaatgattcattgtttgctggccttagtagctcatgcctacaatcccagtgctttgggaggctacagttggagaattgcttgagtccaggagttcaaggttacagtgagccatgatcatgccactgagctccagcttgggtgaagcagcaagatccttatctcttcaaaaaattgttgattgtttatctgaaatccaggtttaactgagcatcctgtattttatatgagaaccctatataggtgagacccagagtcccaatgcccactggtaagcctttgcagggaggctctgtgggtccttggctggcactgatgccctgtgatgagcagggccatctggcaaggtggacgcctgctgcccatgcaggcagagcaaggccctgggcaggtatgagctgatctcaccttccccagcctgggagccagatactgttggcagcttgccgtcaagagaggggctggtcaccaagagaggggcggcctccatgggccttctttggcttttggctctcccccagccctcctcctaccccaaacagaggccaacggcaccgcaccagaaccagtgtgctgcctcctttggttggcattttgtagttgggtagactgtttccttctcacaggagctggtggtgccccttccgcttcacagggaggatggctgagacccctgaccttgacacagggtgctgttctttttttgttttgagacagagtcttggtcttttcacccaggttggagtgcagtggcatgatgttggctcactgcagcctccacctcctgggttctagcaattcttctgcctcagcctcctgagtagctgagattacaggcgtgcaccaccactgagaacaatgccttctacagtgtttattctcctgtaggagcaagttcctaaggcaaggaggttgctcccctcatggatgaataaattgactttgatccacagccccacgtgtcagccttgagggtggggaaaggttgttctgtgtctaggcagggggtgggggcaaggccaggagggcctggtgcccagtgtacctcttcaggacacaactccaggtagcagaggccaaggacagaggggaggagaagagggaggtggccattatctccttatctcagcttcctttggagataagcttgagtattttagttgtccactaagtctggagataagtctggaatttaaacctttgactttgatccagcccttcacagctcctgtgagcaaactgagcctcagaaaaagggagtgaagcctgtgcatcctggacgcccccaccccaggctcaaaccgcccccaccccaggctcaaaccgcccccatcccagctcaaaccgcccccatcccaggctcaaagcgcccccatcccagctcaaagcgcccccatcccaggctcaaagtgcccccatcccaggctcaaagcgcccccaccccaggctcaaaccgcccccatcccagctcaaaccgcccccatcccagctcaaaccacccccaacacaggctcaaaccaccctcaacccaggctcaaagcacccccaccccaggctcaaagcatccccaccccaggctcaaagtgcccgcaacccaggcttaaagcgcccccaccccagctcaaaccgccctatcccaggctcaaaccgctcccaccccaggctcaaaccacccccatcctaggctcaaaccgcccccaccccaggctcaaagtgggaaggagccacagggaaacaaacgggggaggcacggatgaccaggatgagggtctccatgacccacctttccccaggggctatctcaagagctttttaaacttttattattttttaatagagatggggtcttgctgtgttgcccaggctgatctccaactcctagcctcaagccatcctcccacctcagcctcccaaactgctgaggttacaggtgtgagccactgcacctggcctctctcaggagtttcaagaaaaaaaatgggaatagatttgtgtgtgtgtgtgtgtgtgtgtgtgtgtgtgtgtgtgtgtgtgttttgagaaagagtttcgctctgtcacccaggctggagtgcaatggcacgatctcggctcactgcaacctccgcctctcgggctcaagtgcttcttctgcctcagcttcctgagtagctgggattacaaacatgcaggctgattttgtattttcattagagacggggtttcaccatgttggtcaggctgatctcgaactccggacctcagatgatttgcctgccttggcctctcaaagtgctgggattacaggcctgagccaccgtgcccggccaggaatagattcttttctgtagatgacttctgtcattattgaaaatggatgtttatgcacaattgaattgtcataacgcctcatcctaaaaagctcctttttgagaaaatgtgacttttgatagaggagagactgtccaggcctcattcattgtcagcacaaaggcagagcaggggtgtggcggtgtcaccctcctctgagacagccccatccctgctctgcccaggggttcagaagtctggtctattcgagcccacagaggggtttggagtggctgtcttacatcacaggtggggtctgtaaggatctgaaatgacctttgagaaggcgggtgtggtgggtgcatttcaatcattaaagtaacaacaatgatacatcaaatagtgtctgctcagattctgagtgcctgtttaaacatttccatcttgtgacttgccagattctagcataacaacccaggtaaaagaaaaaatagctgggcgtggtggcttgtgcctgtaatcccagcgtgaggccaaggcaggaggattgcttgagaccaggagtttgagaccagcctgggccacctgagaccccacctctgaaaataaacaaaccaataaaagaccttcatgctctatgtctttcttatatctaggttccccaaattatatgcattggggaaagtccattaagagaagcccctggccgggcgtggtggctcacgtctgtaatcccagcactttgggaggccaaggtgggaggatcacaaggtcaggagttcgagaccagcctggccaacatggtgaaaccccatctctactaaaaatacaaaaattagccgggcgtggtagtgcatgcttgtaatcccagctacgcaggaggttgaggcaggagaatcacttgaacctgggaggtagaggttgcagtgagccaagttggtgccactgcactccagcctgggcgacagaaaaagactccatctctaaataaataaataaagggagagaagcctctgggctcctagatacatgggtcagtgtccacccctgcaaagctgctgtgcccaaagaggggctgtacttggtggaattggggcaaaagagcagggagggcactgggcagttgacctggtctccactactggaaaggggctgtgctgctggtgccctgagctggttccacaaggaagacactgcacagggcgccctaagtttgctctttctgcctaggctcaccctttcctctccaggaccagggagccccgctcgtctcctgtcttcggcatctgctctctggcttgtgagcactgcatttctttctgcttggaacgccggcccatggtgggtccccggactcctgccttctgctgtcttttgccatatctcgtcaaagtgtgttttatttatttattgttattattttttgaaacagagtcttgctctgtcgcccaggctggagtgcaatggtgtgatctcggctcactgcaacctccgtctcctgggttcaagcgattctcctgccttggcctcccgagtagctgggattacaggcgaatgccaccacgcccggctaatttttgtatttttagtagagatggggtttccctatgttggtcaggctggtctcgaactgacctcgggtgactggcccacgtcagcctcccaaattgctgggattacaggcgtgagtcaccatgcctggccaactattataatattgatattataataatatcacagccagataacggtgactaacgcctgtaatccgaacactttgggaggctgaggcaggcagatcacctgaggtcagttcgagaccagcctggccaacgtggtgaaaccctgtctctaccgaatatacaaaaattagccggagcgtgatggcaggtgcctgtaatctcagctacttgggaggcggaggttgcggtgaactgagatcgtgccactgcagtccaacctgggtgacagagcaagactccatctcaaaagtagtaataataataataataataataatatcacttattgagttttaattttgtgccaggcactgtgctagtacttgcgccatgtgacctcattgactcggaacaacctatgagtaagcaccatctctgtccccaaggaagctgagactcaggaaatggaagtcatctcccagggcccacagcaagggcctggcgaggtctgcgttcaaattctgatcatctgactccaggctttcctgcctcctttgcctcccaaaaactcaaatactttcatctgggatgactccagacagctagatttcaattgtcttctctccttctgagtatgttttattttaaaatcacataaagataactcacttctcaactggagccacggaatcgttagatgtcttggagacttttctagctacctctttgctggactcagacacaggcctgaataattaggtccaaggagctgaactggagccgctcgtggccagaggtcccttcctgggaacagcagtggcggcagcggctgcgctgagcctggcaatttgttcaagagcaggggatgctcaggctgcgctcgcccccttcttatgaacggtttgctttgcgtcttctctgtgccaagggctgccaggcaccagatgcccattttaggaaatcagaaaaataaacagtgtaaataaaacaaaaactccacccaagaaatctgagacagatgctgttttccccaccgtttctccacccccatgctgggtttggagagagtgggccagcatgtttcctacggataagaggccctggggtatttaacctggatggaacctcttctattttccttttgcctggtgctagggggcagaaggcaggggtggtgtccatctggcccagggaggaggatagggcagcctttgtcgccggcatcccctgcagagatgtctcagccagaagtgactccatcctcaggaacgtgtgtcctgttctttgctgggcggcccctccttaccccccattgtttccacagtggggtgtgctagatttatgggcagagttctggttcactctcagccccggacagcagaatgtcccagtagtgcactgatggtgtgtgcgtggggatgtgtggaacaggggatagtgaccccgtgtgcgttatatgcagtgcggcttccagtcgggtgtgtgaagggggtgctcatggccatcgtggaagtgagctcagctggggctggagggtccaggctcactgtatgccactcagcagccttgggagtggggttcatcctcctccccgctcctctcccctcctggtcctgggcagcccaccggagctgcactctgggccatctctcctggtcttaaggaggctgtcatttctgggaggcagatgctggcccttccatccttgcttcctggagatctgcgccgaggtctgcctttctgtctggagggactggccaggaacccctgggttttcctggtggggtttttgttgcttagcagtgagcagagtgagtgggcaccaagaggaggatgctgggtgaggtcacggacatggctggggcaggctgggggtgctggaggtgaattccgcagctgtgcgaccttgggcagtttgcccagccctgggcctcgcttcctcctctatgaaatggggcgggagcacctgcctgctggggttgtgggttgggtgaatcggagctaaggtacagctcacagcctgccgtcagaccctcgcaagcagaagtgggtgtccctgctcagcgtcctccggtccctccttcaaggctcagctttgtcctcatctcctccatgaagcctccctggttactccaggagtcacgacccacaccctctttggagccttgtgtcacacgcatttctcacggtgttgctttccctggaggatgggttcaactaaaattggggcccatctgggggttccctccagcaccagagaagctcaggcttagtagagatgggtaccctgtcaatactagttccgcgaaggatacactgtgctcattctgctgccagttgctgagtctggtgtcctgtagttatggaacatgtgtacaggcctgggctgctggacacgaaggccagatgggcagttcactctgcctccgctctgagcctttagaaacaagctggctgcacccatttccatctggtcacagtttaggagtggggttgtggaatggatggaaggaaggatgagtgggtgggtgggggggtgggtgggtgggtggatggatggatggatgatgggtggatgggttgatggatgggtggattaggtggacaggtgaatggattggtgggtgggtgggtgggtgaagggctgaataggtgggttgggtggatgggtggatggatgtgtggaggggtggtggggtggatggggtccatgggtgaatggatggatggatgggtgaatggagtaaatgagtgggtggatggatggatggatgctgcaagagcctttctggagggttccagggaggaactggcatctttgaccagcagccagcatggtgatcagatacagggaggtgtctgggtctgcctgatcccttatctcactgttggtgggactgggctggttatgtgtccctgaagctctctgaagggtggctgtatggcattgcccaggggacatccccagagtgccgtgctctacagcaatagggtggccgcctgtgctcccagggccgctcctcctggcagcctttcgggtttgcttggcttagcacctcagcaaatctcctcgagttaggacttgcctgccatgagcctctccaacaagcagccccaggccaaggcctgtgtgtgggcagagggagcgcatgccgcgggaggctgcattaatctgaggttctgtttttgttccctcctggggcaaaaggtaaaaatagcctgtcccactccatccccaaatccagcccggctgcacccagccctgggagtgaagggggctgggtcaggactgcccgtgagttgtagaccctggtgtagggaaaccctgattcataagacgggtggacatggaggaaggaggagactccgtccagcagagacacgcttgggtgcagcccagcttggagtctgatggacgtgggctcacctgtgtgcaactctcattcactgtgtggccacagggaagtgacactctgtggagactcagattccttatctgcaaaacaggggtagtagggcttgggggaggatgtgtgtgaaggtttggcccagggcccctccagcagccagacagcagtggctgtcatccctccagcgtccagggttacctgggggagtagggcctctgtccccagatgggccccgtttctggctctggaactcacagcaggagcaaaggcgaggacattcctggtgttaatcatccacccggagggagagcgccagtggccttgtgtgacctttgccctttgtctctgtctttaggaggcacgcggacctccagtggccggctccggaggcttggtgactccagtggcccaggtaggtggctcgctccgctctggccccacccagctcatgggtgtgtttgtgctggggtcccttcattctggtctgggacctgcctccccacctggcttccctggatgagtggggccacttgcccatttcccagggagacgcagtctttgacggctttggactcaggtggcttccaggcctgtcgacgctgccctgctggagatgatccttgtgggggcaggggcagccacccccaggctcagggagcaagcccgtgtgtgcgggacagaggagagaacaggagatagatagggctggatgatttggtttgagatgctgaggggacagatgtgccatggacaggtggctttggccgtgagcctctcggtgttggttcagtatctgtgggctccctgcaaccttgcaggatggaagatgctccaggatagagcagatacgtccggtgttatctaggaggaaataagtgggcctctggcagtggtcactgtgctactccttgtgctttttccatgtgtttggaaattttccacactaaccagtagggaagggaaacagatgcacccatcagagctctggggctggccgtccaggacacgagttacagcttataggcttgaagggactctaccaacactgggtgcagcctgggcaagggagtgggacagagaggtcagggctctgcctccagcccttgccccccagggctgagtctgcgcgtcatcttctccccactgggtgtccctgatctcccctgcctgaccccagtgtggccatgctagtgcctctgtttctgggagcctacgttgttcttggctgtcacttccagcggccaggctgggacaggtgcccatctagtggcttttctatttggagaggatgatgggtcacagcaatgaatggacttacctcccctaggagacgaggagctctgagaagagcagagatggcgtggtcacctgtgcatatgtgctgggggccaactgggtgccagacccctggctgccatcatggtggcagacaggcagggactgtgccttcatgaattagccattctagaggagacaaagttaccaaaggacacggacccggagtcaaatccacacaaatagagcgcctgtggaccagggctgccttcagaacaaggtgagacagccgtcctgccaggacaaggcgcctacgggggcaagggcatgtgcccatctggagccgccacctccatgctctagaccagctccgtctaatagaaccttctgtgatggtgggtctgttctatacatctgcactccgccatcctgtatggtagccgcttagccgcctgggtctattgcacactcaaagtataaatgtttacgtttactttattcactcatttacttgcatagaattatttatttattttaaatggatttccacttatatctacgtgtggctagtggctatgaaactgaacagttccagaccacactggcacctgagacctcagaattctagacccaaagcctgcttctgatcctgagcttgcttctgtggggacagcacagacgcctcctaagtctgccttccagaggtggatgcagtgcccgtggactgtgcaccaccaggcctggacagtggagagggtggctttttacagggagtgggagtggaggggatgccgtgtccacattgagtgcatgtgaggccccttgcagtacaggatgggactgtatgtgggaagaggggggtgatgctctggctggaggcccctgggcagctgcatgattcagcgctgtggttaagaggggctccgcccatcgcagtcatgttgggcactaaccactggacagcccagccgctgctgtgtttctggggagcttttctccggctccgcatctgatctgcctctccatctccttccctctcattggccagcttctggtggaatgggtggggagggtcccccagttcttgtgggggttgcatcttgggaacctggcaccctgggctgcatggacacagcctcccccggcggttgcttccctctgctcagactggctggttctgtgctgtcagcacttggcagccacgatcacagctcagcttggaagcctaaggcataatttgctgaatcccaaagctgcaagctggtgatctgggtttgcgtgggactgcctgctgacacacggggtcctccctctgtgggcctctgtgggctctggcccgagacaccctttcctcatcttcttggcttctttctttctccctgcctcccttttgctaagaccctggtccaggcaggagttcattcctagacgccccagcatctccggcctccccatttgacactccccagacgactgtctgccatcccatcctcccagcccagcttctctgtagatccacatctggccaatctcctatgtctgggactcttgccctccccagaaggacgaaggctcttctcgaggttgtgtttgggactgggccagggatgacatttctggcaaaagcttaaatgacaccatgatcaacgctttggtcagctcacacactttctttccttttaaaaaaaaaatggaattcttagagctacaaaacaaaaatgtaaagaataaggtaataaaacacctgtgtactcaccatcccgcttaagaagtgagacattgcaggtgtagccgcagccctgggtgaccttctccatcctagccccactcctgctgcggtgcccgcccctctggattgggatctggccccgggcaggcacatctgtgctgggcagtggtgtgtctgagaagcctaggtctccttttttttttttttgagatagagtctcgctctatcgcccaggctggagtgcagtggcaccatctcggctcactgcaacctctgcctcctgggttcaagcgattcttctgcctcagcctcctcagtagccaggattacaggcacccgccaccatgtctggctaattttttttgtatttttagtagacacagggtttcaccatgttggtcaggctggtctcatacccctgacctcaggtgatccacctgccttggcctcccaaagtgctgggattataggtgtgagccaccgcatccggcctggtctcctcttgcatacggtcatcagcatcgtgtgactgagcagcctaggtctgtctcctcttgaatgccgtcatcagcatcacatccttggtgcctcactggagtcagtggctgccctgcctgtgcccacaacgtgacggcgtggagacttatccgtgtagatccacgaagccttggttcacttattttggcagctagcgagtgttcctctgtgtggggaggcagagtttgcccgtcccgtggcccactggtgacatcgccgaaggtcttctctgttactagtgctgccgggaacgtgtgtttccccaggtggatttggctgggctgtggagatgcgcttctcagcccttctagatgttaccaccacgccctcccgagtggccttctggtaggctctcccatgttcgctcattttctgtgcctcaggcagccgcctctctgactgagcgtccagcggacttttgccctgtttcccacggtgcacggagcatttcatctcagtggtgcctgagcttccctccctctggccctcagaccccggctgggatccttggagccaactcctctgcctgacatcccgtgtcgctaggtcctgctcttccatcttccaatacctctggggtgtgtggccttttccccagtgcccccatcatcccttctgtcctaggttgaaccgtgtcccccacaaactcatgtccaccaaaaacctcagaatgtgacctgggagttggagatggggtctttgcagatgtaagtagttaaggatcttgagatgaggtcattctggattagggtgggccctaaatccaacaactggtgtccttaaaagaagcagagaggccacagacacaccggggagagccacgtgaaggcaggagcagatgatggagtgacgcagccccaggccagggagcgtctgggaagaggcaaggaaggaccccccccccaccccaccccagagcctccctagggagtgtggccttgctgacaccttgattttggacctctggcctccagcatgggagagaacccgcttccattttttcaagccccacagctgtggtccattatggcagccacaggacactgatgcacctcccacctggccgctgtggatggacgaccccgcccgcaggaagtctccctcaagcactgcaggtgtctctgccctcacaggggacgcctgcacaagtaggtgtgaaaaaagggccctgtgggggcaaggcctgggctggtgctcgctgcctcccttcatcctatgctagttcccatgcctcttccggcaggagtgcctggctccacctggtgaatcagagccaaactctcctgacaattggctgtcacttatttaactgccaccatccccaggagacagaaaatgccagaagggtggggcctgtgcagtgcctcctcgctatttccccagggcaccgtgccacgttgcctcaatgcacagagtagctgctcaaagtgtgtcggacgaacaggtgccccatgcccagccatgcagacaaaagtgtgccacgtggagggagctggtcgtggaagagaccaccagcatcttggctgcccgaggaccttgcccctgggctcttgcaggcacccctagttcattacttcctctctcacccatagctacccactcttcctctatttctctgatatcagccttgccacccacccaggtttgcaagcaggaaatctcagagttgaccttgacctctgcctccccagcacccccaggtctcaacaggctgccaagatctcatcaactcgccctctgcatactgacccttggacaggctgccccggtcacggtcatgtcttggttgggcctccatcatccctccttggaccagcaggtgccatcctccccacccctgccctgctgtggctccttcccctccacggccaacatttagaggacgattaccacttccctccctgtgtgctggggaccgggtgataggatccctccacccgatcatttccattagacctgggccgggtcttcttactcatagagcccttagtttccgcccccaaagcctcgagggtggattcgtgctgccgcccagcctggccctgataccgctttccagcctggagccccctgcttctgcgctcctggctctgagtgctcgggccccccctggatgggttgccacttgtcctctggaaagcagggcttccatgctcctggacctcctagctgactcagtgactttgggccatcttgtcacaccccttctatcagcttggccttggttatttctgtgtcctccatagcctcggaccagagccacggcgggatgctttcctggtgcgtggcaggcagtcaggaaatattgctggactgaccttgataggagatgcttgggagaattgcccaaaaaactagcttaaaatgcaaatattggccttcttttgcgttggctaaagagtagcatttctccgtttgcctcccgggtaagaaattgatggcgaatgcaatgtctctagggaggagaagaaggtgacaaaaagggtctgtataacggggcacacgctaggcatttgtgactatttaagtttaaattataacataaatgcgaaactctttgccttggtagcccttccacattgcaagcgttcactgccacatgtggctgccatattgactacggcagatacagaacattgacatcattgcggagagttctatgggggggcgctggtttagatcatcttcacgttggatccacaaattcattgtttatccagtgaacggttactgggcacctactgagcaagcaggatgaaagacacccgctctcgggggagtcttccgttggctgcagagaagcttaaactcaggggacctggggcaaactctgcaagggcccttggcctctgcacccccagacctccctcgctctgcaggggcagtcgggggccccctctaggaatggagcgccagctccagctcctgtcaggctacagcccagatggttggctgagcacgagcatgtgagagtggaattgggcccaaccgggctgcttctccccgttgtcttggtttccttccacgctgacctggaaggactcctaaagcaacaggcctgcccaggcggtttgcaccagtaaaccctgcagcggccccaagggcagagatagctggattgtatttatttaggaacagccaaagtctgaggcacaataaaaagtggagaaagattccagagaggaatgcagctggcctcagcctgggaatccgtcttgcttgggaggctgtaggcgggccaggctggggccagcctggagggtcttggctggctctgctggcaggtacagtagcagggtcagcaggagggagtccaggacggagctccttcatttttaattcagggaagcaaacttcagtggttgagtctgaggatgagcaggaaatgaatggaaaagtcttttttttttcttttttctttctaggcagggtctttctctgtcccccaggctggagtgcagtggcacaattatagctcactgcagcctcaacctgccaggctcaagggatcctcctgccttagcctcctaagtagctgggactacagttgtgcgccaccatgactggctaattcttaaaagaaatgttttcaggctaggcatggtgacccatgcctgtaatcccagtacttttggagccgaggtgggaggatcacttgagctcaggtgctccagaccagcctgggcaacatgacgagaccccgtcttgactaaaaatacaaaaagttagctgggcgtggtggtacagccctgtagttccagctacccgggaagctgaggctgcagtgagttgtgatcacgtcactgtcctccagcctgggcaaagggagtaaggccctgtttcaaaaaaaaaaattttttttttttttgaggtggagtcttgctctgttgcccaggctggagtgcagtggcatgatcttggctcactgcaatctctgcctcccaggttcaagtgattctcctgcctcagcctcccaagtagctgggattacaggcatgagccactgtgcctggactttttttttttttttttttttttgtagagatgggatttctctatgttgcccaggctggtcttgaactcttggcctcaagtgatcctcccactttggcctcccaaagtgttggaattacaggtgtgagccaccacacccagcaggaaaagtcactttttaaagcgagaggttgtgcgtcctctatagcttggcgctcatcagcatggaggatttactggaacgtgtgttaggtgaggggacatggaagatggcagcaaatccgagcccagagcatcagaaagcatgctttcagccaaagatgcgttctctccacctccgcgcagcacccttccccagtgtgtactcctggagcaaggtggggccgatcctacgaagaccctttcccgaaggcccctgctgcccacatcagtgtcacctggaccgcctgctcccttttctggatggctggaccagccccagggcctcctggcctggtgtggggagcacagtccaccctggggaatgcctggtatgtgtcccctccccactgggtaccaggggatgaagctgtgcttcgtggaaggggacagaggcgctggtgcccaggatggtgcacctggggcggctgaactggacctggctcctactgggcccctgtggagcccagattgttgtgagaaggggtggggaaaggcaggtgatccgcacctttcacttttgtttcacatgggaacaggggcttatcctgcacacatattcagtttggagtatgaatttccatgaagaggaaaatctctattaggctctgatgtcaggattgtccgtgagggccgggccgtgttctggggcaaggacaggagtggagggggcaaccagggaaggcttcctaatggaggaggcatttgatagcatcttgaaaaagaagcagttcctaggccaagccagagactgaagaatgaccacctaacttcttttttttttttttgagatggaatctcgcgctgtcgcccaggctggagtgcagtggcgtgatctaggctcactgcaacctccacctcccaggttcaagcaattctcctgcctcagccttctgaatagctgggattacaggcatgcgccaccatgcccagctaatttttgtatttttagtagagacggggtttcaccatgttggtcaggctggtctggaacccctgaccttgtgatccacctgcctcggcctcccaaagtgctgggattacaggcatgagccactgcacccggccacgaccacctaacttctttctacaagatgccccctggctgacgcaaagcaggttgagtgagtgtgacacttccttcctgtctgtgggttccggcctttccagagcccggccagtgctattggagacaaagtggccttcgctcttccttcccgccctgccaggcccagcctgtgccgctgagccccactttgcaattaagaggagctgtgaaccagtgatgctgatgtcgcagaaaagtggccaggggtctatggggggtgaaggacagggatgccgccctgagaactgtctggaaggggcttttgggtaacagtgcccactccagggtgtgggcaggctggggtggctgggagctgggctcataggctggcacaaccagagtttcccaaagccgtgggcctgagggccctgccttcctgggacagcaacctttggtccaatttgggaaaaggtgggttaaaccaagcccggctccctcactgtaggattactcagtgcgtttagtatgcaaatgtgcctctgaatctaagacaggaccacagaaacctcttcagtgttcctctggagggagggaccgcgggggatccaccgcaggggcctgggtctgcactggcctggtgaagtgcccccttagtgcttacaccatgcgcggtgagaggttggccctcgcctcccccaccctctgctggccttacctcaccacctctgcactcgcctcccagccggctcatgactaactcctgcctcttcagagccaatcggtgctgccaggttttccatttcaagtgatcccccgcctgggccaaaatgtttggattttcaggcacggaggggagatggacctcaggccaaaccatgctgggtaaaactgagggtcaaggctgtgctcagcaagtgctccagccctggccgtcaaacccatagtgtgcacagcgtgcaggaggtggctgggtgaatgaactcagtcatagcccggcccctcactcggggctgttcccaagttcccaccgccagccaggctgggtcagagcctcgtggggccttcctgggcttccctgccccacagcaggagttcgtatggagagtctcgagtgaggttaatgggttttcttcctcttctttttttttttttttaatttgagacagggtctcactctttttacccagccagggtgcagtagtgcaattatagctcacagcagcctcgaactcctggcttcaagcaatccttccgccgcagcctcccaaagtgctgagattacaggcacgtgccaccttgcccagctggggtttctgctttttactttttctcttgtttctaaactcaatacaaagaaagatattacatttataatcagaaaaaccaacaaggaatattatttcaaaattggaaaagggattaaagaaacaaaccaagaaacctctgcgattcctgcccatcggagtcagtggttgttagtggttggcttaacacaatgttttaggaagaaatagaataacagaaagcaactccagtgagctgagccctggctccgtctgtggcgctgcatcagtttcctgcagctgctgtaacgagtggccacaagctggctgggtcacaacaacgcccagccatcctctcacagctctgcaggccacacatccgagatcagggtcaccaggctgaaatcagggtgtccactgggcatagccctctggaggctctagggcaggggttcccagccccgtgtgtcctattaggaactggcctgcacagcaggaggtgagtgactggcaagcgagcgaagcttcatctgtatttacagtcactccccattgctcgcattactgcccaagctctgcctcctgtctgatcagccatggcattggattcttataggagagtgaaccgtattgtgaacggcacatgtgagggatctaggttgcgtgcttcttatgagaatctgatgcctgatgatctgtcaccgtctcccatcaccaccagatgggaccgtctggttgcaggaaaataagctcagggctccaactgattctacattatggtgagttgtataattatctcattatatattataataataatagaaataaagtgcacaatcaatacaacgtgcttgtggccgggtgcagtggctcacacctgtaatcccagagtgaaactctgtctcaaaaaataaaaaataaaggccaggcacagtggcttatgcctgtaatcccagcactttgggaggccaaggctggcggatcacgaggtcaggagttcaagatcagcctggccaatatggtgaaaccccgtttctactaaaaatacaaaaattagccggacacggtggcaggcgtctgtagtcccagcttcttgggaggctgaggcagaagaattgcttgaacccaggtggcggaggttgcagtgaactgagatagtgccactgtactccagcctgggtggcagagcgagactctgtctcaataaaataaaataaaataaaataataaatataatacacttgaatcatctcaaaaccatctccccactccctggtctgtggaaaaattgtcttccctgaaaccgatcccaggtgccaaaaaggttgggggccactgccttcatcgcctgcccctttgagcctctggtggctgtgggtgtcccttggcttgtggctgcatggcccttaccttcaacaccagcatctacagatctctccgggccccatctccacttggccatccctgtctgtgtcaaatctccctctgcccccgtcttgtatgagcaccgagactgcctttagggaccacctagaccatccagggtgctctcgccacagcaagatctgcaactgaatcacagatgcaaaaactcttgttccaaacaaggtcccatttgcaggtctagggattaggacatgctatccctggggccattattcagccttctctcgtgactatgatccctcccttcctccccagcctcccacctcggctgagatgctgtccccacctccctcactgtctggctgcctgtggggctgtcctccaggctctttgggaggaggtggttgcttgatgtctcccagaaggctgggaatggtcctccccaccccccaggaagatgtcctttctgccaaggagattgcatttggggtcctatcccaggcagagagcggacgggactgtggcctgaagtggcacttcagggcctttggctctgtcatctagccgagggctgtgcatgggcctcacctggtcacaggtaactcacctggctctgtggggcagggattgtaaactcagaggcctgcggggtgtgtcgaggtagaggggtgcaaatattgtaaatttgttgggggccttggggagcagcacagactgaaaagtgttttgtctgaagagcagaactgtcttataccagccctgtgcggccaggcaggaaggcttccgtggtgcggccacgcgtcctccctttctcaacagaagctgacagtctggagttttcagagagattgcctgagttctcagccttggcacaaacacacattctctttaaacaggcttgggccaacagaaccagcctccgtgtctcgggtttgaatgaacccttgaggtgaagcttaaagacagagaggatgcccctgattcccaccccagggacccacattgtaaacccccacctgctctgctgagcccttggcctcagcatggaccctgaccatgtgctggtggggaccccccaggtaagtaagcagcctctgaggaccccggatgaacagtggggaacagcactgatcccccagtggggccccgagttcccggagaggaagactcgctccctcccaggggacggctagagactcactgactcatgcgtgtgtggtaggaatcttccaggaagtccccgtcccgttcgccctctctgcctgggcggggacggcaactgcctctgtcactgcagactaatgggacggaggggggtgacttctcagggttcctcctgggcaggtgctccggaaccttttctcagcacgctggcctggggcacggccgttcctcctgcccagccacgttggggtacagggtgaagaagggctggggccagcccaggacagaggaaggcgaggcaggcacgcaggaactgggctttttaaacccttaagcccaaggaaatcgtagcatcgcgggacagggaaaatgaaagactttggaagtcgtcaggaatttgactctgtgagttggtttccaagagtctaagttaagcatctccaagtggatattaaaaaggagcagcaagcctcggggcggcgggggctggaggaggtggagagaggaggctgccggaagccgcactcgggacctctgcagccaccgaccagaccgggcggccgggactctgggactctcgcaggcagacccggtggtctgccggactcctcggggcccacttcgggccctctctcctgcctcctatttttggatttctctcctttgctccctttttcctcccgttttgaagagacaatgctacttcagtttggagcacaaacatatgatcagcacatggaaatgtggtaattcggatgcattcgtgattgcaacagattgaagaaattagaccagacaaagagtgtttttagaggaggaggaggaggaggaggaggctgagagagggagggcgacgggggtgagaaaggggaggccgcctctgagcgggacgccgggactcccgccgctgctaaatatatccgtaggaatggagagggaccggatctcaggtacgcagacagccccctccccatcggccgccccccactgccctggactcggggctttatttatgcctgggggaataagcatgcaaagggcgcttttgctcatttttcacagaaatatttcttttctttttgacggttccaagctcgtgggatgaactccgtctcagaagctaagctctcctgagtctggcttttatttaaactcggctctcctctctcctggctacttccctttcattttccagtgtgccattcttgcatgtcatggccactgtcaatgctgaggctgttggcgccgaaaccttgggagggtgtgggggacctgcccccctggctcgggtctggggcggcggcgcttggacctggctggtggttggtttgtccactgtgtggtttgttttttgcttccagccaaagtctgtcttcaaggctgcctcggtctcctacctaaaatagcatttctgtgccttcctggcagttgattatagagggggaagctcccggcgctcagaggagcctggcgtgtgtgtgcacgtgtgtgtgcatgtgtgtgcgtgtgtccattcacgctggcagcccccttgccgcaggcacagacccatcagggcgtgaacaggcaaatgaagagaaagggggctcccctgcctttagttcaccccagctttccaggccctccctcccaggcccagcctccttggtcccttcactcacatgcggtgccgtggctgccatctcacgtggccagcgccgtcatcggtaattagcagtgatgacagtttctgccgctcatgccgccctctgagcccagcgctgggagacatggggtggctgagccaagctccaggctttgggtattctgaagtgacctacgggccatggagcgggaggtcgctaagagtgtcaacccctacgtgccttgggccctggtctgttggttgccactatgtgtgtgttggggggtccctgagaggcctgagagagggaggcccatctcggtggctcctctctaggacgtgtggtcccctccaccactgctcccagggccacatctttttttttttttttctttgagacggagtctggctctgttgcccaggctggagtgcagtggcgcgatctcagctcactgcaagctccgcctccctagttcatgccattctcctgcctcagcctcccaagcagctgggactataggcgcccgccatatttttttgtatttttagtagagatggggtttcaccgtgtcaaccaggatggtctcgatctcctgatctcgtgatccgcccgcctcagcctcccaaagtgctgggattacaggcgtgagccacggcgcccggcctcagggccacatcttgattgtcacgttgggactggtggagcgggtgtgtgttgtgccgctgagcacacccagtcgggcacagcaggcggacctcaggagggggccaggggagacggcagaaggcttgggtggcagtgaaactgcatcttatctgtttgagctcgggggctcaggcccgctgggacgggtgggtgtggagcccagcgtcctgctctccgcccagcaggagccgcagggcagggagcgctgagagggaccttcgtcaggcttgcacagtggagccgtcctcggagtgaccaccccaccaggcagcctgggcagaccacagtgggtcccctgcctcctgggccaccagccccaggaggacgtcactccacccgcctggctggcaggggcctcggggagcctcgggttcggccttcactttatagatgatctagccgaggcccagatgggtgaccagcaggggatctgagagctgagcagagaggcgtgggtttgggggtggtgctccctggggagctggaagtgatggcaccctcccaggctcacaaaacacgggcttttcatgaactgaacaaaacactctttgaaagcagccagtgctgtgccccagagaccactctgatccctgctgcccttggctgaggacagcacagccagggatgaagcggggacctcccctcgggctgtgccttgatgaaagatgctttctacaaaatcccattcggatgtgttttcatgtaagaaaacgtacatttttagaaactcagttgtaaactggctgccttccgaatgaacacgacagtcccggagctgtttcccttaatgaggttctcgtcctgggcaaactttagcgctggtctttaattgtcactgaactcccgcacagtccctggggaagtgacttccttcctgtccctgctgggtggccttgagcaagccacttggcagctctgggccgcagttccgtcatctgcaaggtgaggggtgggagcggcacggcccctaggcagcgcccccacctcctgcgggtttctgcgcgtgtcctgagttttgtgggcgcctcttccctcactgaggggctcttcttctctgcagggcatggctcacgccgcgttgtcaggctgcaagccactgcgagagctgctctgatccccaagcatgctctggcctgaggaggagccatggggaggacgctgtgcctgtgtgacagaggcctgcccggcagatgccggcccgctgacttccagacgtggctgtgggtgcctcatgccccactgggctggcgtgtgaggcgtgtccagctcaggctgccctacagctgcccaggaagggtttgtgggagggggtggtcctaccctggtgagtccacggtggtctgccagccccagggaaggcttaggagccccaagacctgccctcttgtccctccctcggcagtgtctggctccggtctggtttgtgaacgggggcctgggtactctcccgccctccctgggggctgtggccttcccctgggaaggtgctggagggtttgtcagcagggccggcatgagtcatggagtggtgactggccgctgaggcatggaaggccactccttccagccaagggtcggagctttttttttgttctggaacggctttgtggcttttacaaattaagcagttttatcttgttccaagagcttgtatttcagcagggagagagtctccaagaagggaactttccactggggagctctgttgggctgggaggctaggaacaggccacgagggagggctgcaggcaggggaagtggccgtctgtgcatggtcatgaatgcaggcccggggtcctggagggggcttggccacgctgtcgctggacgtctgtccccaccagggtccatctgatgcagtacggcacagggtaaagcccagctcctcttacggggttcctgggtcatcagtgggcggggaaccgaggcctcctggagggcggtgcctcagccctcacccctccctcctgtccctcgctgtgctgtccccgatggcctctgccatcccctgggagttcttacccctggacgctcggtgcctgtccggtctcaacctctccagctctgcttttccatctccgaggtgagaggcctggcctgacgcgctctgcacccgcttcctgcccagccccgtgggaactctggtccctgtagtggtttcctggggctgccatcaccaagtgccacaaactgggtggctcaaaacaccagacatttcttctctcgccgttctggaggccagaagtccgaaatcacggcatcagcaggcctggttctttccggaggctccgagggggagcctgcttctcgcctctggcagcttctggcggctcccgaaacccttggcgttccttggctcgtggccacaccactcgacctctgcctccgttgtcacggggcctccttctgtgccctaaatctccccctgtctgtctctcatacggacagtctttctcggatttagggcccactgggtaacccaaaatggtcccatctcaagatccttaacttcataacgtctgcaaagaccctttttccaaataggccatgttcataggctctggggtggatgtaaattttaggggccacctttcatccccctgttgtccccgtgtgtctggatgcacagcatggttccatgtcccagactccttgctggacccctctggccctttggggtggcctttggccttttccactcgtttctgtgctcctggtgaggtgtcggggtcgggcttagcccctgcaggaattctggggacagcatggagccggcaactccccaccaggcgtcttcctacctgcccagagctcatggttgtgaggggtctctccttgtggttttgatttgcaattccccagtggttagtgatgttgagcatcttttcgtgtttattgctcatttgcacatattcttgcagaaatgtctgtccaagtcctttacctgtgtttgatttggatgattgttgttgctgagtgttaggagatctgtagattaatatccagatactaatcccatatctgacctatgatttgctgccattccatggattgccttctccccacgttgttagtgccctttgatatgcaatttttttttttttttttgagatggagtctgactctgttgcccaggctggagtgcagtggcatgatcttggctcactgcaacctccgcctccctggttccagcgattttcctgcctcagcctcctgagtagttgggattacaggcacccgccaccacacccagctaatttttgtatttttagtagagacggggtttcactgtgttgactaagttggtctcgaactcctgacctcaagtaatccacccgtctcggcctcccaaagtgccggagttacaggcgtgagtcaccgcacccaggctgatatgcaaatattttaaacttctatgacgttccactttatctatttgttcttctgttgcctgtgcttttggcgccatatccaagaaatcattgccaaatgcaacgtcaggaagcttttcccctgtgttttcttctaagagttttgtggttttagctcttgagtttaggtctttgatgcaagttgagttgatttttgcatgtggtgtaagggctggtccagcctcatgctctgggctcttgattcacttctcttcttttctcacgcccagctggttccgctgggtggcggggaggagtggggaagtcccgggctgggcctgcactcgatcatcccctctcaggccagccagggagtctcagctcctgcccaggacctggctggacgtgctccctaccgggaaagcctgggccgtctttctaggctgatggcagggccagcccggggcgtcctgaggcctgccctgcggacatgccccttgttctaggtggtgtggctgcccggcctgcgtgtgagaccagctgtctgtgcttcaggccatggaggctgagtgtttccagcctgtccccttgctcggctctccctctggggaagcccctgcagcccattctctgcctccgcttctgccatctgtgcctttgtctgcttcctgtttggaggtggtcatccctggggccacccctcatgatctggacacaagtctccatcctgaagccaccacccaaacccctgtgcctcaaacccctcccacccaccacatgggtttccactgtgaccaactcagcagctgatgaagcttcccttggggctctcctagcaacggggagctggctttcccggaggcctggcctctccctaagtggaagtggggcgtgagggtgtcagcctttttctgctgcctggtgctctaggttggcttgtcacccctggaagcacttgccatccttatacagcaccccacacccacctccccgcctcctaccccttcttccaaggggtcatctctgcttccctccccacccaacctcacccatgtggtccgcccagcaacctttgacccccaacatgacaaaataaacctcccttgccggtcactcattcattcattcagcattgggtgctccctgtggacttggcgctggggtcccgtggaggacaaagccagacacagtccttgccctcatgggactgcacaagtgcaagaccacatcagtaaacgtgaaacacaggaagtgacaggtgtgacaaaggggaccagtggcaggacagaacctgcggttcgtaggaccaggtcaggagggctgcctcggggggacaccttcgggctgagcgcagaaggatgaggggagtaaaccaggctcaaacccagcaggcagaggcgatcgctgcaggcaaccggcaatgtgttcaaaggccctggggcgcggggggctgaggccggcagcacggcaggaagtaagactggggttgaaagagactgactgtcatgttgtgaaatatacacttggttttcatctccatttcctggcacacaactcctaaaatccttggaatctccaaagtgatgtctttttggatgctcatgattgacagaccagctggcagcttcaggatggttcccagggaagaccaggtagaatcacaaggttcagcaccaccccgcaacctccaggtaggggagaggggctgaaggttaagcagatcatcagcggccaatgattgaatcaatcatgccttcgtaatgaggcctccgtgaacactcagaaggatggggttccgggagcttctggatggatgagcatgtggaggctcctggagggtggagcgcctggggagcacatggaagctctgcgtccctcccccataccttgccctacacatctcttcccctgtatcctttgtaatatcctttataataaactagtaaattccatgagccccaggaacatgtgtaaaagaaaaaaaaaagaataaaccatagctgctgtagcaagttaatcctaccagcactggctctcatctgccgaccttacctctggcaatgcctccctctcctgggctcctgggacccctccggccccaccacccctcctgtagtggtctcgctggctgctgccctcaggttagtttatttttacccggcctgctcccaccaggggctgaggcctccttgctcactccagcttcctggcccgtctcttgctctgggcacccccccactccgaacggccagagcttctgaagccgctcgctgtgtgcccccgcctggccccatgcatcccgcacggtgctccccagggtctcccactggcaagggcattggcatagattctggggctgccttggttcaagcccaccctgacttggagcctgagggtccctgagggggtcctgaaggccagggcaggcaaggctggcatgctctgggcagtgggggctgggtatgggaggggatcgtgggtggggagattcctcttaaccagcggcccacgtttggagactgatttgggctccaggctacgccttgaaattgggacagagagtggcgcagatctcagcccggagactccctctgcctgtggacgccctcatacctccatccgtggagccaccctcctctttttttttctaaatggggaaactctgacttgaacactgaataaacaacacaccctcgaaatcagcgaagaggcactggctctgaaactttgccatgaaagcttgaaaatgctctttggaccgatttgctggaacagacgggtgtgatggggctgcggggtttcaggtggcaggaggcgtccccgtgcctagggcatcccgatgctcagagtttccccgtgcccagtgtgtccctgtatccagggcatccccatgcccagggtgtccccgtgcctagtgtgtccctgtatccagggcatccccatgcccagggtttccccgtgcccagggtgtccctgtatccagagcatccccatgcccagggtgtccccgtacccagggtgtccccgttcccagggcgtcctgtgcccagggtgtccccgtgcccagtgtgtccctgtatccagggcgtccccatgcccagggtgtccccatgcccaggcactgcctctccccactttcctaatctccctccaccaacaggtgtcagctgtgaaatgcctgctgtgtgtgtcctttggttgagttcatcttgtgctcttaagttcctgttagacacaggcaggctgctttagttcttctggcaaatgttttgttgttgttgtttgatacggggtctcactccgtcacccaggctggagtgcagtggcgccatctcgcctcactgcaacctccgcctcccaggttcaagcgattctcctgcctcagcctcccaaatagctgggatgacaggcgtccgccaccatgcctggttaatttttgtatttttagtagagatggggtttcaccatgttggtcaggctggtcccgatctcctgacctcaagtgatccacccagcttggcctcccaaagtgctgggattacaggcatgagccaccgtgcctggcccgtctggtgaatgtttattgaggcctactatgtgcagcccctctcttaggtgcttggcctgtaatgaggagcaacaaagacacagtcgctggtcgcttgttacttaacagttggaactgagaggcagtccacaaatgagcaaatccataggtggttttagatgaggactgtgaagaagctaagaacaggttgctgggggtgcatatctgtgtgtgtggcgaggggattaatggaagccctttctgagtggtgacactgagctgaagctgtaatgaccagaaggacccagccaggccaaaatccaagggaagagcaacctggcaaaggaaacagcaggtgtgaaggcccgaggctggagcctggggaaggtgggagtggctggagtgtgttttcagagacgggccatggtgacaccaatgcgacaggcagggccaggtcgtgccgggccttggaggccctggtgagggcttgattttattctcactatggtgggacctcagtgccctgtggctgctgagaatggccaggggcaggcagggaggcctgctagggaggaggctgctgcaggccctgcagctggagagggaggatcaggatctctttagagaggaagttggagagggaggatctctttgattgctggatggacccacctgcctggctgcccccgtcagcatccagcagaggccactggatgctgacaggtggccggccctgcccagccttgcactgccctgtgctgccctggtggctgccggctttaggaggagcgcttttggtgtctgagcccagtggtcctggctgtggtttggtacacttggccgtgggtgaggccaaggtggtttggatcctgggaaggttgggtacctggcagcctcaaggcaggagctggggtgttggaggaggaagcacgctcatccctcgttccttcctgtttcgtgggatgctgagtctctgggcagggacatggtgagccctggtgtgatgcacttaacacctgctggtgcccccatccccaagcaggaaccctggtgcctggtgcctgaggactgctgtccaccgtcccaccatccttcaggtttcttcccagcctctgactcggggcaaggttcagatatccagaacattcttggctggctcttggagctggggtgaggcagaacctccctcccatatttacagcaccagccaaggcttcggggtttggacaccatccctgggaggggtgagcaggacaagtgaggtctccagacttggggtggcttcggactggccaggcaggtgggtgggggctgcagtccatgcccccgctccaggcaacacagtcgagctgcagcccccgctccatccccagctggggctccctgtgctcaccttctgcttccttcctctccctcggaatggggggtggacactccaagactagcctcccagccactctccctgcctcctgcctcctctccttcgggacagacccctgtgatcgctgggtgttcctgatgctctgtcccctctgcgtcctgtgccgtgggtgagagagggcttcggggggacttccccctcttggagcacctgctgctccgggtgcctctgggggcgggcccccacctcacattgtggagctggtgtaggaaggaaggtgccgggagccagctccaattcacgtgctggctgtggccctcaaggtgtggatggcaggaggtggtgagacagggactcattgatcatgggactgacaccccctcatgttgatgtgggccctgagccataatctcaccagctcctgagttttggcgctgctcttggcgatggcgtggactcagccaggctctcgggcagcctttcctggattcttcctccgttctcccctgggcagtgtttctgttcacctggaaaggatgggtaggacttggagacaacagggattcaaagaagtcgggagtgggggcacctgtgcagctcaccctgcagaacagacaatttggttaaagcctaaagcctgctgtcaggagcctcgcttgcctctcagagagcacatggcttgaccatcacggggactgggggagaggcacaggcatgcctgtccggcagcagaagggaaccccgggcctgggcctctccattctgtggcgttgtctttcctcagagttgcactgtctccttcactgtccctgcctggccccagtgctcatgtggcttgtggccctcagtctgggcttggtctcccgcaattcaccctgcccagccccacacagcttgtccctccagctgggaatcggagctcacctggagtcccaggcagcagattcgatgcagtgatgcagggctgtcagccatgccagcaggccctgctgctcacagagggatgggtattgctgttgacaataattaaagaactacggcttcaggctgggtacagtggctcacacctgcaatcccagaactttgggaggccgaggcaggagaatcaattgaatccaggagttccagaccaggctgggcaacatagcaaggctttgtctttacaaaaaataaaaaataataataataataaaaactacagcttcagaatgattgacttcagcatgtttataaagtcaagggtcttcagtgtcctgggcctatgtcactgcgtcagagggagagaggaagaggctggggtgatgggcactggggcttatgctcctcctggaatgggtggtcttggactgtgcctgtgtgatatgtttgtcgagcgggggcggtgtccactgaggactggatgttgaggtgtgggtggggggaggttatgaagcactgggcatttcccgtgcaccagtgccccgagattgcagagaggggacccgcccagcctgggcagggaggcgggtggcagcgaggaaggggagaggaactcgggtgcagaaagcctttcctccagcaggtggcgccgcaagctctcgagagtccagctcctgcggggtttgcattttcactgaatttgtgggcagaggctgcctgggtgtagtttccgccaactgtgactgctcactgcgggcgaggggaagtggagtgcagagaatgcaccggagggcagatgaccagcccccgcacaggcacgggggtgcctccttccccgcacaggcacggggggcccgagcccttggggttcctgtcctaactgggcggggaaagggagggttggaagctgagttagggggaaagggggtggtctcctgccatctcttttattttatttttcctatttttggttgataggtttcaatcttttttacatttttccaactttttgccgtaaaacttttcaaacatagaaaagatgaaagagggctgagtgtggtggctcatgactgtaatcccagcactttgggaggttgaggtaggaggatcacttgagcccaggagttcaagaccagcccgggcaatatagtgagatcccatctctataaaggatacaaaaaattagtcaggcatggtggtgcaggcttggagtcccagctactcggaaggttgaggtgagaggattgcttgaacctgggaggttgaggctgcagtgagctgggattgtgccaatgcactccagcctgggcgacagaacaaaaccctgtctcaaaaacaaaacaaaacaaaaccacaaaaaagaaaccatgaaagattctaaagtaaacacccatgcacctaccacctagattccacagcaaccattttgctgtttgcttcaccacaaatccctctggccaccagcatccacgctggttttgatgcacttaaaataagctgcagaaatcagcacacaacatcctgtcaacacctcagtttgcatttcattaactagagtccggcatttgtctgtgattatttttgtttttctttgaagtaaaatgtatataccctgagatgcacaggtgtgaaacgttccgttctttgaattttaacaaaggtatccacgtgtatcccagcctgaccagaacatagaacatcactatcaccccagtaagttcctcatgcccctccaggtgcatcacagtccccaccttccccagggcaaccacaattgtgctttttttccaccacgaaataattttgccagtttgagtgtttcttagagctacccatgttgctgcaggtgccagcgatttgttctgttttattgctgagtaacgtccactgtgtgaacattctgtgggtttttagtcattctcttgttgaaagacccctggctgtttccatctggaggctcttatgagtaaacctgttacgctggttcttcttgtacaagtttttctgtgcatatgggcgttcatttattctgtagaaacacctagagtaggtatagggtaggtatacatttagttttataagaaactgccagatcttttcccaaagtggcccttccatttcacactcccaccagcaatggatacgagttctagttgctccacatcctggccaacatttggtgctgtcactctgtgaaatcttagtcattctggtgggcgtgtagtggtatcatctcattatggctttaatttgctttggcctgatgactaatgcggttgagcacattttcatgattggctcttcatatatttttcctttgtgaaatgtcttttcaaatctgttgctcattttaaaattgggttgcttgactttttcttctggatactgatcttttgtcagatacgtgttttacaaatattttattccagtctgtggcttgcctgttcattttctttcctttttcaagaacaaggtctcgctgtattgcccaagcaggtctgaaactcctgggctcaagctgtcctcctgcctctgcctccccaagagccggttttacaggcatgagccaccatgcccggcctgttcattttcttagtggtattttccaataagcaaaagtgtgtcactttaatttttatgaagtctaatttaacaaactcctttctttgtggttctctctctgtgttctttgtaagaaacctttgcctaccctgccaaattgcaaagatatttatgttttcctttagaaggcttagagttatatagcttttatgaattaacttttgcatatggtgtgaggtagagggtcagggttcattttgttgtcgttttatgtgtttattcagttgttccaaacttcatttttttttaaagcttttattttgtattttcttggtgacttatgaggtcgcacaattttccaagatccttgttggtcatttacgtattttcctttgtaaaattatctgtccacgtcttacttctttttaaaattatgttgtttcaagatcgagtgatttctgaagccttcattttataatgcttgaaagaatgaacaccttgttccccagctacaggcttctgctctttgtcctgcagctgcacagtggggtaagacttgggttttgttttgttgctgctttgttgtttcttcatttgactgtttccccatgggtctcatttaaaaaaaaaattggccgggcacagtggctcacgcctgtaatcccagcactttgggaggccgaggcgggcagatcacgaggtcaggagatcaagaccatcctggctaacacggtgaaaccccatctctactaaaaatacaaaaaattagccgggcgtggtggcgggcgcctgtagtcccagataatcgggaggccgaggcaggaaaatggtgtgaacctgggaggcggagcttgcagtgagccgagattgcaccactgcactccagcctaggtgacagagcaagactctgtctcaaaaaaaaaaaaaaaaaaaaatgttgtttcatatgttttttatatattctggatataagtcctttatcagatatatgtatcataagtttttttttccacattgctcctttccttttggttttcttaatgatgttatttaatgagcaagagtattttgttttcataaagtccaatttatcaactttttccagtttcgatttatgatttttgtgacctatggaggaaatctttgcctacactaaggtcaaaagaagttctcttattttctagaaattttatagttgtatattctatgattccttttattttttaattttttaaatttttacattttttaacctattatagccgtcaggatgttgtatgatccattttaaatcagtttttgtatttggtttgaggtcagggttaattcttgtttttctatactcatatccagttctagcaccgtttgttgaaaagacataccttactctattgaattacctgacacctttgctaaaaatcattgactgtatatgtggccctatattagtatatgtacgtatatacatgtaggccctgtgttgactgtatgtgtggtcctatattagtatatgtacgtatatacatattggccctatgttgactgtatatgtggtcctgtattagtatatacatatcagccctatattgactgtatatgtggtcctgtattagtatatgtacatatatacatgtaggccctatgttgactgtatatgtggtcctatattagtatatgtacatttatacatgtaggccctgtgttgactgtatatgtggtcctgtattagtatatgtacatatatacatataggccccgtgttgactgtatatgtggtcctgtattagtatatgtacatatatacatgtaggccccatgttgactgtatatgtggtcctgtattagtatatgtacatatatacatataggccccgtgttgactgtatatgtggtcctgtattagtatatgtacatatatacatgtaggccccatgttgactgtatatgtggtcttgtattagtatatgtacatatatacatgtaggccctatgttgactgtatatgtagtcctatattagtatatgtacatatatacatgtaggccctatgttgactgtatatgtagtcctatattagtatatgtacatatatacatgtaggccccatgttgactgtatatgtggtcctgtattagtatatgtacatatatacatgtaggccctatgttgactgtatatgtggtcctgtattagtatatgtacatatatacatgtaggccctatgttgactgtatatgtggtcctgtattagtatatgtacatatatacatgtaggccctatgttgactgtatatgtggtcctgtattagtatatgtacatatatacatgtaggccctatgttgactgtatatatatatgtggtcctgtattagtatatgtacatatatacatgtaggccccgtgttgactgtatatgtggtcctgtattagtatatgtacatatatacatgtaggtcctatgttgactgtatatgtggtcctatattagtatatgtactgtatacatgtaggtcctatgttgactgtatatgtggtcctatattagtatatgtactgtatacatgtaggccctgtgttgagacactattgtgttttcttgatattttgtccattcctttgctgatgccacatcttgattaatgtggctttacagtaagtcttaatataaagtctctcaaatatctaaaatattactttgaatattctaggtcctttgagtttccttataaatttaagaagtagcttgttgatgtctacaaaaatgcagtgtgaattttggttgagattgtgttgaatctgtagatcaattaaggaagaattggcattttaacaatattgagtcttttgtatagatggtatatctccgttttaaaggtccttttgtatttcttttatttctctactgaaaaaaaatctctacagaattacattgttttgtagttttcaagaaaaagatcttgcatgccatttgttaaatttattcctaagaattttacttttggcactattttaagctgaaatagattttaaatttcatttttaattatttgctgctagtatgtaaaaatacaatagatttttgtatgtaaatcttatatcctatgatcttttccaaagtcatttattactctggtaatggttttgtaggtcttttaggatttaaatacatagttttacttctttctgatcttgatgccttgtttttttttcttgctttattgcactggttagagctgccagttcagtattgaatagtagtgattagtggacatccttgcctgtgccaaacttataatgttaactttagatttgtcatatatgacctttgtcagattgaggaaattcccttctattcttaatttgctgaaattttttaacatgaatgggtatgattttagtaaatgctttttctgcatctatggaaatgatcattgttttgtcttttattcgtttaataggataaattacaatgattgatttttgccccccgttttttttttttttttttttaaagaaacagagtctcactcttgcccaggctgtagcacagtggtgccatcgtagctcactgcagcctgaactcctggacttaagcaatcctcccacctcagcctcctaagtagcagggactataggcacatgccaccatgccaagctaatttttaatttttaaaattttttgtacagatggggtctcattgtgttgctcaggctggtctgcaattcttgagcttaagcaatactcccacctctgcctcccaaagtgctgagattacaggtgtgagccactgtgcaggcctgattttttaatattgaaccaaccttgcatttctggaagaagtccaacttgcttatgagatatcatcctttttatatattgctaaatttgatttgcccagtttttaaggatttttgcgtgttgattcatgagggatattggtgtggtattttctttgtttgttagtttgtttcggtaatgtctttgtcagcctcattttggcttcataaaattagtttggaagtgttcccttctctttgttttctgtgttttcataaggttgatgttgtttcttccttaaatgtttgatagaatccaccaagaaaaccgtctggacctagaattttctactaggaaaggtgattgtttgtttttaatcacaaattcaatttaatgtatagaaagagttattcaggtttttttacttccccttgtcttacttttggtaagttgtactttgaaggaatttgtccctttcaggtaagttgttgaatttactcatttaaagttgttcgtaatacaagcatacctagggtttgcttccagacctcggcaataaagcaaatattgcaataaagcacgtcacacaaactttttggtttcccagtacatataaaagttatgtttaggccaggcatggtggctcatgcctgtaatcctagccctttgggaggccaaggtgggcggatcatttgaggttaggagtttgagaacagcctggccaacatggtgaaacctcatctctattagaaatacaaaaattagctgggtgtggtggcacatgcctgtagtcccagctgcttgggaggctgaggtgggagaattgctcgaacctgggaggtggaggttgcggtgagctgagatcacaccactgtactccagactgggtgacagggcgagactccatctcaaaaaaaaaagaaaaaagttatgtttacactatactatagtctattaaagtgtataagatcattatgtctttttgctaaaaaatgctaataatcatctgagccttcagcaagccataatctttttcttggtagaaggtctgcctcaatgttgatggctgctgaccaggtggtggttgctgaaagttgaaggtagctgtggcagcagtttctttgtttcttttttctttttctttttttttgagacagagtcttgctctattgcccaggctggagtgcagtggcacgatttcagctcactgcaacctctgcctcccgggttcaagcaattctcctgcctcagcctcccgagtagctgggactacaggtgcctgccaccacgcctggctaatttttgtatttttagtagagacagggtttcaccttgttggccaggctggtctcaaactcctgacctcaggtgatccacctgccttggcctcccaaagtgctgggattacaggcgtgagccactgcacctggccggcagtttcttaactgaagtttttgacatgggttgactctttctttcatgaaagatttttctgtggcacgcattatgtttgatagcatcttacccacaatagagcttccttcaaaattagagtcaattctttcaaccctggccacggattgatcaaataagttgatgtaatattctaaatcttttgttgtcatttcaacaatgttcacagcatcttcgcctggagtagatcccatctccaggaaccactttgtctgctcatccataagaagcaactcctcatctgttcaagtttgatcatgggattgcagcaatccagtcccatctccaggctccacttctaattctagttctctgctatttccaccacatctgcagtgacttcctctgctgaagtcttaaaccgctcatccatgagggttggaatcaacttcttccaaactcctgttaatgttgatatttcaacctcttcttgtgaatcacaagtgttcttaatggcatctagaatggggaatcctttccagaaggttttcaatttactttgcccagatccattagaggaatcactaactatggcagatactgctttataaaatatatttcttaaataataagacttgaaaatcaaatttatcccttctccatgggctgcagaatgggtgttacattagcaggcatgaaaacaacattcatctttacatacatctccgtcagagctcttgggtcacaaggtgcattgtcaatgagcaataatattttgaaaggattcttttttcctgagcagtaggtctcaatgatttttttttttttttgatggagtctcgctgtgtcacccagaatggaatgcggtggcatgatctcggctcattgtaacctctgcctcccgggttcaagtgattcttgtgcctcagcctcctgagtagttgggattacaggcacacaccaccatgcttggctagtttttgtattttttgtagaaacagggtttcaccatgttggccaggctggtctcgaactcctgacctcaggtgatccacctgcctcagcctctcaaagcattgggactacaggcatgagccactgcaccgggccctatttgttttttttttgttgttgttttttaattgagacagagtctcgctttgttgcctagactggagtgcagcagcgctatctcagctcaccgcagcctccgcctcccaggttcaagtgattctcctgcctcagcctcctgagtagctgggactgcaggtgtgcactaccatgcctggctaatttttgtatttttaatagagatgaggtttcaccaccatgttggccaggctggtcttgaactcctgaactcaggtgatttgcctgccttggcctcccaaaatgctgggattacagctgtgagccaccgtgcttggcccttttttgtttttttgttttttttcaaattgagacagagtctccctctgttgcccaggctggagtacagtggcacgatctcggctcactgcaacctccgcctcctgggctcaagcggttctcctgcctcagcctcccaagtagctggaattacaggcgtgtgacaccatgcctgaataatttttgtatttttagtagagatgcggtttcaccatgttggccaggctggtctcgaactcctgacctcaagtgatccccccgccccagccttcaaaagtgctgggattacaggcgtgagttgccgcaccaggcctcaatgggtttttaatattcagtaaaccatgctgtaaacagatgtgctgtcaagtagggcctgttattccatttctgaagcatagacagaatagatttggcagaattcttaagggccctaggatttttggaacggtcaatgagtattggctttaacttacggtcaacagctgcgttagcctctcatgagagtcagcctgtcctttgaagctttaaagacaggcattgacttctcccctctagctatgaaaatcctagatgacatcttcttccagtagaaggtgggacatctatgctgaaattctgttgcttagtgtagccaccttcatcagtgctctgagctagatcttctgggtaacttgctgccgcttctccatcagcacctgctgcttcaccttgcacttttacattatagagatggcttctttccttaaacttcatgacctgacctctgctagcctcaaactttccttctccagcttcctcacttctcttagccttcataccattgaagagagttagggctttgccctggattaggcttttgtttaagggaatgttgtggctgatttgatcttctatccagaccactcaaactttcttcatatcagcattaaggctgttttgctttcttcttcttcatgtgtgcactggaatcgcacttttaatttctttcaataactttttcttggcattcacaacttggctagctatttggcataagagatctcacttttgcctgtcttggctttcgacacgccttcctcactcagcttaatcatttctagcttttgatttaaagtgagagacgggtgactcttcctttcacttgaacacttagaggccattgtagggttattaattggcctaatttcaatattgttgagtctcagggaatagggatgcctgagcagagggagagagagcggggaacagccagtcagtggagcagtcagaacatacaacgtttattgaataagttcactgtcttatctggatgtggctcgtcatgccccaaaaacaactgcaataatggcattgaagatcactgatcactgggcgcggtggcccatgcctgtaatcccagcactttgggaggccgaggcaggtggatcacctgaggtcaggagtttgagaccagcctggccaacatggtgaaacctcgtctctactaaaaataccaaaattagccaggcgtggtggcgggtgcctgtagtcccagctactggggaagctggggcagaagagtcgcttgaacctgggaggtggaggttgcagtgagccgagatcacaccactgcactccactgcactccagcctgggcaacagagcgagactccatctcaaaaaaaaaaaaaaagggccgggcgcagtggctcacgcctgtaatcccagcactttgggaggccgaggcgggcagatcatgaggtcaggggattgagaccatcctggctaacacgatgaaaccccgtctctactaaagatacgaaaaaaatagccgggcgtggtggtgggtgcctgtagtcccagctactcgggaggctgaggcaggagaatggcgtgaacccgggaggcggagcttgcagtgagccgagatcgcgccgctgcactccagacagagcaagactctgtctcaaaaaaaaaaaaacaaagaaagaaaaaagaaaaaagagatcacagatcaccatagcagatataataataatgaaaaagtttgaactatttcaagaatcatcaaactcctacacagagacacagtgttaacatgttgttggaaaaatggtgccagcagacttacttgatgcagggctgccacgaaccttcaatttgtaaaaagtgcagtatctgtgaagcacaatgaaatgaggtgtgcctgtgttccttgtcactgtaatgtcggtaggatccgtaaggaaaacacttcattccttttattgtgactttatgttcgccatctccctctcatcagcagcctggctaggaggttatcaatctagatctttttaaagaaccagcattggactccccttttctggtgtccatttccttgagtttctctgttatcttcattacttccttccttgtacttgcttcagcgcattagtcagggcccagtcaggaaacaaaaaccacaccggcaatttgaatagcaacttgtaatataaagtgttcttaactgtaagaggtagttaactattaaagggatcacaaaggggtgacattgtgatataagaaagatgtatttgggctgggctcggtgcagtggctcatgtttgtaatcccagcactttgggaggctgaggcaggcggatcccttgagctcaggagtttgagaccagcctgggcaacatggtgaaacctcatgtctaccaaaaatacaaaaaattatcctggcgtggcggtgtgtgcctgcggttccagctacttgggaggttgaggtgagaggatagtttgagcccgggaaggcagacgttgtggtgagccgagattgcactactgcactccagcctggatgacagagggagactctgtctcaaaaatcaatgtatctgtctgtctgtctgtctatctatctatctatctatctatctatctatctatctagtctctgtcccccaactttgtttggcatgtagctcctaaaactcttgaaatctccaaagtgatgggtgtctttttgtttgctaaggaggcgactggtggctggaggctcctggacagcctggggataagggctggttgccaggggacccagccttgtgattagaaggctagaacttgcagcctttcccatccacctcctgcgaggcaagaggggatgaaggttgagttgatcatcaatggccaaagatttcatgtcatgcttatgtagtgaagcctccctgaaaacccaaaaggatgaggtttgtagagtttcaggttgttgaatacctgcaggtgctgggagggcagtgtaccctcccgtggaagctccatgccgcttccttcatacctttcttatgcatctcttccagttggctgttcatttgtatcctttgaaatatcatttgtaataagtcagcaattttaagtaaactgatttcctgggttctgtgagtcactcaagcaaattattgaacctgagaagggagttgtgaagacctcaaatttgtagccaagtcagacagaagttatgggtaacctggtgtcttaccacttgcgactgatctctgaagttgagggcagtcttgtgagatggaacccttaacctatgggatctgcactaactctggttggtgtcagaattgaactgaattgcaggacacccagttggggactgctgagtattggagaattgcttgggggtcggcgggaggaaaccacacatctggtgtcagagctgaagcactgagtgttgtgaatgagagtggagagatagagtttgttttgccttatgcaagaggactctaaggagtatagaaagagcaaatatgagaagcagctactttagaagaaaacataggaggaaagcttcgtgacattggagttggcaatgctttcttggatgtgacaccgaaaatacaacaaaagaaataaatgataaattggacttcaccaaaacttaaaacttttgtgcatcaaggaatactaccaatggcgtgaaaaggaaatccacagaatggaagaaagtatttgaaaatcgtatatccgataaaggactagtatccagaatatataaagaactcctacaactaagccacaaaacaaaaaaaaacaacccagtgaacagacatttttccacagaagacataccaatggccaagaagcacaggaagagatgcgcagtgtcactaatcatcagggaaatgaaaatcaaagccacaataaaatatgatttcacaccctttaaggtggctgttagccaaaacatggataacagcaagtgttggcaaggatatggagaaattggagccccgtgcactgctggtgggaatgtaaaatggtgcagctgctgtggaaaagatataacaattgctcaaaaaattaaactcagaatgaccataacatccagtgattccacttctagatgtatactccaaagaactgacagcagggacttgaacaggtgtgctacattcttgtttgtagcagcacttttcccataaccaaaagatgcaggcaacccaggtgtccaccagcggatgaatgaacagacaaaatgtggtccatctgtacagtggaatattattctgccttaaaaaggaaggagaggccaggtgtggtggctcacgcctgtaatcccagcgctttggaaggccgaggtgggcagatcacttgaggtcaggagtttgagactagcctggccagcatggcgaaaccctgtctctgctaaaaatacaaaaattagccaggcatgggggcatgtgcctgtaatcccagctactagggaggctgaggcaggagaatcgcttgaactagggaggtggaggttgcagtgagccgagaccatgccactgcactccagcttgggcgacagagcaagactgcctcaaaaaaaaaaaaaaaaaaaaaaaaaaaggagattctgacacatgctatagcatagatgagccttgaagacatgctaagtgacagaagccagacatgaaaagacaaatactgtatgatttcacttttatgaggtccctagagtagtcaaattcagagagacagaaagtgggatggaggttgccagaggctgggggaagggagaatgaatgggaagttggtgtttaatggggatagaattgcagtttgggaagatgagatggatggtggtgatggttacacaacagtgtgaatgtgcttcatgccaccaaactgcacacctgaaaatggttaaaatggtaaattttctgtgatggatactttaaggcatgtatgcaaacacacagaagcagttactaccactggggttgatggaaaagaaaccaagaactcggagcgtcctccacaccttgccacgtcttacgttcaggccttgttggagagtgtgtgactgccacagaaacctgcagcctactggtaacaaaaaggttcttgccagaaggtgtagaaagagtggatctgcaggatcagcttactgggtagccgagaaacctactagagggtatgggtgggcaggagctgggtgtctgagaagtttgctgaggtcccattgggctagagctggggtgctggagaaactcagtacagagcaggccccactgggcacacgccactggcagctgtgccttcagaggaaaaagagaccctggaaccaggaagagaagctgctacctcagcaaggcctggcagctccccacagtgttgtcccctgtggatagagcctgacatgactgtatttggccaaggagaaagactcataaggcctcggtccagtatcacggagcggggcctggcaggatgtatgcagagttaagaggcaatacatgggtaactggcatatttttccagattctttgttttttttgttgttttgttttgttttgttttgttttgttttgttttgagagagcatcctgctctgttgcccaggctggagtgcagtggcatgatctaggctcactgcaacctccacctcccgggttcaagccattctcctgcctcagccttctaagtagctggagatgcccaccatgcccagctaatttttgtatttttagtagagacagggtttcaccatgttggccaggctggtcttgaactcctgatctcaggtgatccacctgccttggcctcccaaagtgctgggattacaggcgtgagctacactgcacctggcccatttttccagattcttaaagcagatccttaggtctttttttttttttttttttttttttttttacttcttttctaatataagcacttacagtttccctctaagcactagcttcagcctacgtattttagtatgctgtgttttcattatcatttcatttgaaatattgtaaaatttttcttgtgatttcctctttgactcatgggttatttagaagtatgttgtttaatttgcaaatagtcaaggctcctctgagtatcttagagctattgatttctaatttaatcttactttggccagacaagcatattttgcatgcttttaaaatttgagacttatggcccagaatgtgtatcttggtgaatgcactgttttcacttgagaaaaaaatatgtatatatattctagacttcctgagtatagagctttataactgctgattaggtcaattgctagttaccagtgttcttcagattatctgatgcttgtttctcagatgttgagagaatggtgtttgctatggcctacctgtttgtgtcccccaaaattcatatgttggagcttaatctctggtgcagtggtgttgggaattggggcatcagggaagtattggctcatgagggcagagtcatcgtgaatgggattagtcccttctgccatgtggggacacagcaggaaaaggacatctctgaagcagggagctagctctcaccagacactgagcaccctgattttggacttcccagcctctagaactgtgagcactacaatctgtttataaattacccagcctaaggcattttgttttaacatcctgaatgaactgaggtggtgttaaaatctccaactatgcatccaggcgcagtggctcacacctgtaatcccagcacttcaggaggccaaggcgggtggatcacctgaggtcaggagtttgagaccagcctggacaacatggtgaaaccttgtctctactaaaaatacaaaaattagctgggcgtggtggcaggctcctgtaatcccagctactcgggaggctgaggcaggagaatcgcttgaacccaggaggtggaggttgcagtgagccgagattgcaccattgtactccagcctgggcaacaagagtgaaactccgtctcaaaaaaaaaaaaaaagagtctccacctatgattgtggaattgcccatttctccctttaattctttcaggttttatatcatgtattttgaagctcctttggttaggtgcatacacatttatgattataatggtgtctcgatgaactgatcatttaaccatgatgaatgtattcctttatctcgtaataattttatcttggactcaactttattgatatttatgtagcctctccagccttcttaaacatgctgtttgggatgcataagaaggctggagaggcttatggagaaacttatgatggtttgacttacagtttttcaactttaccatggtgcgaacgtggtatgtatacagtagaaactgtactttaagtatgtgtgaaaccattgtgtttctcactttcagtacagtattcaataacttacatgagatagtcaacactttattataaaataggctttgtgtttgttgattttgctcaactgtaggctgaagtaagtgttctaatcatgttaaggtaggctaggctaagctagaatgttcggtaagttagatgtattaagtgcatttttgagatgatatttattttccacttatgatgggtttgtcaagacataactccatcatcattcaagcagcatcagtatgtctttttccaaacagaaaatttcaacctgtgtttatactgaaacagcatcttttgtagatagtatatagttgagtcttgctattttattcattctgacagcctccgccttttaattggaatattcaggctatttctgtttaacatagttatagatatgactgggtttagagctactaccttgctctttgatatttatttctttcatcttgctttcttggcttcttttatgttaattaagtattttttagaattctattttaatttatgttttttttttttttttttttttaagacagagtctcactctgttgcccaggctggagtgcaatagcatgatcttggctcactgcaacctctgcctcctgggttcaagtgattctcctgcctcagcttccctagtatactgggattacagacgcctgccaccacggccggctaatttttgtatttttagtaaagacggggtttcaccatgctggccaggctggcctcgaactcctgacctcaggcgatccgcccaccctggcctcccaaagtgctgggattacaagcgtgagccactgagcccggcctgttttgactttttaattgtatctctttgtattgctattttagtagttactttatagattctattgcacattcttagcttttcacagtctacttagaattaacattgtttttcttcatggaaaaaaagtgtaagaactaggcaatcctatgggttcatttaccactttccatcctgtatgtgatggttgttagatatttactacatccatacacattgtaaactagacaatacaataaggaaatttttgctttaaacagccccatgcattttaaagaaattaaaagtaaaacagaatcttttctatttgcccatgtatttgctatatcctgtgctcttcattccttcctgaagagctgagttcccatctggtctcatttcccatgatcttggagaacttgcttcacggtttttgtagtgcaggtttgcagacagctaattccctttcattttcacttatctgcaaatctttattttgctgtcattctttctttttttatttttatttttatttttgagacagagtctcactctgtctccccacaggctacagtgcaatggtgtgatttcaaaactcctgcccaatctcaactcaccaaccttctcctcccgggctcaaacgattctcctgcctcagcctcccaagtagctgggactacaggcatgtgccatcatacccagctaatttttgtatttttagtagagatgggatttcaccatgatggccaggctggtctcgaactcctgacctcaagtgatctgcctgctttggcctcctaaaatgctgggattataggtgtgagccactgtgcccagcctgctgtcattcttgaaccataatttcactggttatagaattctgagttgtcagttttttctttcaggactttaaaatatagggttccagtgtctttggcctccgttgtttctgtcaaggaatcagcattcatctagctattcccctgtagaccacatgttgtttttccctggatgcttttaagactttttatccaagtttgattgctcagtacctacctctgggcaaaaaagcctccagaaaccagaaacttatctagttttattcccctctgtcaggtgtagactctactccagcttctacctacttgagatattctatactgactccaggctgttgttattttgttctttcaaatattttgtccagagctataatgttttctgcagaattgaccagatagcagctactctctgtgaccaggagccttgatcttccagacttgctgatgggctcacaaagctcctgcccgtggccctcagttggcagtggcctctctgccttgaagttgccatgagtgtgtaaaacctacaggctcaaccttcctcattagtacagtccagaaaagtggaattcctggtctgggtggctatggtgccctagaccactggctagaccagggtggtgactgccagctggccgaatgtggggtctccagcctagcacccttggactctaccccaggagttatggctgtttcagggccaggggcctggcctcagcccctgtcccccttctcttctcctcaagttgcccagcatcaggtcccaaccagcatcttttgcagacagggtgggtcggctcctcactagaggggcagggttgggcgggaagcctgttgagccctccttcctgtgcagcccacagccctggggttagctccagaggggtgcagaaaggagcccccaaaggcagaaactcacccttctctctgttcttgtgcttccagggataaaggagaggtggtcctagctggggggctaccagtggcatgcaggaggcccacatgaccactgtttgctggggcctttccttctctgtgagagagacgagagagaggagagagagtgtgagtcagggtagtgtcttcttccagtaacgcagacttctgcacgtgttctctaggagaaatcccgtcactcgctagagctctagatctggaagaagctctgcctctcttctctcctccagtgcagtgtgtgtgtgtgtgtgtgtgtgtgtgtccccacatgcattacacccttctacagaggaaataattcccgtccaagtgcaaaggttgggattggagcaggcagcatgtgggctaaaggagcagagaggaggaaacgggggcgggggtgagggtgggaacaggaggtgggtagatgccacgaggcatgccttccacaactagaagggctggtggagatgaccagaatgctccagacagaccttttatcaaacttccaaaattcaatcttgtttcatgaagcctgaggaccctgcagagtgaaagacaaggaagggctttcctgcaggggggtgtgtgtgcctgtgtgtgcctgtgtgctgtgtgcccccatgtgtgtgcacgtgtggacctgtgtggtgtgtgcctgcacatgtgtgcacgtgtggacctgtgtggtgtgtgctgagtgtgtatatgtgtgtgcctgtgtgctgtgtatgcacttgcacatgtgtacacagatctcattttccttttttctggcttactaagtgccagaaagaatttccgtgagcctctccacccttcccaaggctgcacatggagggacttgcgcaggcacatgtgcgcgtgcacacaacacacacacacacacacacacacacacacacacacacacacgagtcaggggcgagcactcctgtggattgtacctaggcctggcaggaaaccgggttctgggaaactgtaggccccacctttggcagaaaaccatgtttttgttgctgctcgttgaagggaacattaagtggggctggggacagtttatgttgagaagagcaaattttgcctatggcactggggacattgagtggctcctgtcccgggctctggagggcttgggagacacgtctgcagctctgggcatctctcaaggtcacgggcggccacactcaaggttaggccctcctctgtgtgagctgcggtcagcaggaaggctgacctcagaggcggccccagggcccttggaggccctgcccctgagacatgggccaaggtcagagagccgagaaggctgctgctgaggactctggttggcgcccagcccagcggcccttcaggcgggccctgtgcaggggctgatgaagtcagctgggaaatctgtgaaataaagcacaggtcccccaggcttgcccagagccccggcatcagatgaggtgcagagaagggaactgagctgccaagtgtgaacaggagagaggagccccaggaccacacaggggccccgacatggcaggtgcttggtcagcagcggtgctgcccttactgctggacgtgggaaaatgcactgacacttgctgaccagagccggggtgagcatctgggtgaccctgcagatgagacaaaataagggctgccgtgggggaggggcccttgccgggccaccctgctgaggccctgtgttactgtcctgcggctgtcataacaaaggaccacaaatgaggtgactcaaaacatccgaaatcggccacgtgcggtggctcatgcctgtaatcccagcactttgggaggccgaggcggttggatcacgaggtcaggagatcgagaccatcctggctaacatggtgaaaccccgtctctactaaaaatacaaaaaaaaaaaaaaaattagccgggcgtggtggtgggtgcctgtagtcccagctgctcaggaggctgaggcaggagaatggcatgaaccttggaggtggaggttgcagtgagccgagatcgcgccattgcactccagcctgggtgacagagcaagactccgtctcaaaaacaaaaacaaaaacaaaaacaaaaacatccgaaatgtcttccctaaagtttctggagccagaaatcccagaccgaggtgtctgaaggttcattcctcctgggggttccgagggagactgtcccatgcctttctccgagctctgcggcggccagcaacccctggtattcctcggcttgcagctcggcctaccccccacctggccttcaccctgtgtctcttcttgtgtctctgtccaaactgccctctctgttgtctttttaatttatttttagggacaggttctcattctgtcctccaggctggagtgcagtggcgtgatcatggctcactgcagcctcagcctcccaggctcaagcaatcctcccacctcagccttccaagtagctgggacacaggcgcacgccaccatgcctggctaattttttaatttttttgtagagacgagggcccaggctggtctcaaactcctgcgctcaggcaatgagactttgcctcccaaaacactgggattagagacatgagctgctgtgcccagcctacctctgtcttataaagacacctgtcattggatttagggcccactctgattcaatatgccctcaaataacccaattacatcttcaaagaccctatgtccatataaagtcacattcataggtactggggggtcaggacttgcatatgtcttttgggggaacacaattcaacccacaatgggtctcacccacagaacgaacggcctctccagggtgtgcgcaggtgggtgaggggcccaggagagggacctgcgtggcaagagggcttgtgttcacgtcagagattccagaaggagactggatggggtggctgcatggagcaaggggctacagccactgtctccaagtagttggtgggttgtctggtagaaagggagcatttattttgagttcccccaagatatgaagctagtaccaggtacctggaaggtgctagcgagtagagcttgactctttacagaaagaggtgtttttctcacaatgttcacttgaggacggtggaacaggctatttcacaaggtagtgagttccccatgcctggaagcattcaagcaggggccatgtgggagttgttcaggagtgcatagaagggacctcagaggtccctgccaataccatctttgcttgtcttattttacgacaacttgaatttcagaatgtaatgttattggggatatgtctactagaggggcctccagcatcaggccccacacactatgcatcatttttagggcagggaatgagagcaggctccattctttttggttgtctgtgaggaccaggaggcttgctgctgaggcagcttcctgtggaaacagtgtctcagccccgcaatccattcatcggagctccaacatcttaatgaaacactgtgtcagatgggttctgggcatgtgtgtgcagattgtcacaagtccatgagaatgcacacacgcacattgcatgtgtgtgcacacatgtatgcacacatgcacaagaacacgaagacccgaggcaggtatagtccgtgagacagatccctctaggctgaaagactccccacaagggtccctagaacaaggctccagcctcggcagtccctcccacttctggtgggaggatctccacagagaagaagggtcaagaagcacagctcttgatgctcacggtgtaccaagctctgctttaagcttgtgtcttattttttacttatttagcaaatctgtcgctcttgttttgtgccagatgctgttctcagcactttacaaatattgatgcatgtttgtttcatgacaaccctgtgaagtaggtagtgttaccccgttttatagatgaggaaacaggcgtagagggataaagggacttgcccaaggtctgtctctaccttacacgcacatgaacgctcactcatgcggcaggcgctagtttccctctgatgtgagtcaggccttgagctggttggggtctgggtcccactttggttgtgttttgctgtgggcaccaaggaagcttctagcagcctcatctccctggtatgacctagctccagggactggatttccccaaatgctcctgcccagcctggagcctcctttccagctgggggagggctgaacgacccctcactcttggaggctgccggagcccctcctgcctgcatgcggccgctgccgggtggacaggcctgcttgtgggttgaggctcccagcagctggggtggatcatttctcctcccaagaagctttgggagaagcagctgagggggccagcgtcctcctgaggccaattccctgcctcccccagcgcaggcgcgaagccatctttgcttgtgtgtttgccacagacagtggagggcggtgcaatcgtgacgcctgcttgttgcactttgcgtccttgaggacgttgacccctggccggtgctgggcgcttgctcttcagtcatcttgccctgacctggcgtggcaggcccgagcactgctcttttacaaggaaacaggctcagaggccttgagtcacttgcccgggctcccccagccaataattggctgagccaggatttccatccagctctgtgactccagaagtccaagttcttcccatcacgtcagggccaggaaaggattagaatgcttttctacgtgccgattatttggatgatctgtgcagcttagctcgttgtagttgctcaataaaaatgtggaatgaatgggcctatatgtcccattgtgtgactcagagccaatgactctggctgatcctcctgttttcattccgtggcccagcatctccctttggggtgtgtgaccttggaagcagtgactctctccatcccaccttgaatggtgtctgcgccgcagcaggggagcagctggggattgccagcgcctgttgctggtgggctgtgcgccagatcccgtcttggatgtgtgggtgattgtcagccacatgtgtgtgaagggctgtgcgtgtaggatttgtgcaaatgtgcccctccctgctgccagcccatgggaggctgtcaagattctgcccctgcacattagcccacactctctttgtggcccactgctgtggctgttcccttgtgtcacgtggctgcaggcacagcccccaagtggatggggatcgtgggctgaatgtgcatcagatgctcctgcttcttggtgggtggagaccctcaacccatgcaccgtggctgccgcatctgaaaggccttccatggtgaaggacttggacctgagcaaccctccgcagaggtcttagaagtgctccctggccgggcgcggtggctcacacctgtaatcccagcactttgggaggccgaggtgggcggatcacaaggtcaggagatcgagaccatcctggctaacacggtgaaaccccgtctctactaaaaatacaaaaaattagccgggcgtggtggcgggtgcctgtagtcccagctactcgggaggctgaggcaggagaatggcgtgaacccaggaggcggagcttgcagtgagccgagatcgcgtcactgcactccagcctgggcgacagagcgagactccgtctcaaaaaaaaaaaaaaaatgaagtgctcccagctcttcctcctgtggtgaggttctgagtttccatcctcagaagaaaacctggctggggagggcatctctagacccggacataaacgccaggagaccagggctgccctctcaggtgaccaatcacagagactcagggaaagtcacgtttggaagaggcgacactgtgtctcagcctcattcatttctccatcctacagacactgcctggtgcccagcccgcaccgcgaggcttcctaagcagctctgggcaccgtgcacctggcatggcctccagccccatctccctgccttgggagacccggtggggactccgggctgagctcctgtggctgtggaaccttggtggtttattgtggtggctgagaacagggacgtggggttggacgggttgagtgtaactcccagtggctccgtgaactgcctgggagccttgggcagctctttctcactctgtgcctccgcttcctgatggaaaaatgggggccaggggggagcgaccttgaaggtattcgtgggaaccaagcgaggtgataaatgtagtgtccttggtagagaactggacacagagtccacccccatgaagggggctgctcctcctccttctatgtttcctcttgttcttatttctcctcttgtatcttctcttcctgctttccctccccctcccctccccccccacatgcaggcacactccatttggtgccccaactgcctttctccattgtccttctgtaagtggttctctaagtgggaactcaggcctggaaagggtgggcaccctgtctggtgggctctggcaggccaggcgctgagcagcctcaggagacacaaccctaggaaaaggctcatgcaggctggctgtcatgacggactgttggtgggagaggggaaggcgccgtggtaggggaagctttggaaacatccactagtggccttatttatgactcaggacacctgccaggtcactagaacacagctgaggaagctgtcggccagacgtccagaagcatcaacctggtggctgggctgtggggggacctctctggacaggcagacaaggtgtcggaggaaggggctgacactcactcagtgtctgtcatgcactgagggcacaaagggcaggatggagagctggcccacgccacctgtggaatcttccaggtgtgggggcagatggggaagcaagggggcttgaagacacatgcgctcattaaatgtccttaaatcccaagaagaagaacaaggacacatccacaggggcagggctgaaagtctgatgcatggtgttttggggtctgctcctgctgcaacagctacagtggctccctcttacctttctcttccctccattctgttgtgaaaatgttcaaaacacatggtcaagttgaaagcattttacagggaacacattcagccatcacctagattctaccactaacaccaagctacacctgctttatcacctcaccgtccatctatccctccttcgcctggccatgaatccattttatttttattttttggtgcatttcaaagtaatttcaggtcatcctgattatctctggaatcactgtcagaaattccctcccttcccctcccctctcctttcctttccttttctgagatgggatcttgctaggtcacctaggctgaagtgcggtggtgcagtcatagcacactgcagcctccaactcccgagctcaagcaatcctcctgcctcagcctcctgagtagctgggaccgcaggcatccaccaccacacccagcttcattttcaaaatttctcaccaactcctcactccttgtattcacccaggaccacttctcacaaagccagggtgctgcaggaggggtcagaaccccaagccctaatcctggctctgtcattaacactgtgcgaccctcagcaaatcattttgcctgtctaggtcctgttttcattcctatgaaacgagggcgttaaactgtatgttataaataatgagggctaccagttaccaagctcctattttaggccaggcacttttcacatgttattatgagtcctttcaatctaggtattgttctcaatggacagcttagtcaacggaagctcagagaggtggtgtaacttgccaaaagtcccactacccagtgaatgtccccacggggtctgcacccaggagtctgacacagagcccaggcctcagcacctggcgatgttttgggggtgtgagcagcccagcctactctgggcacgtgtttacttgctgttccttctgcctcatgtttgtgtttgtcccctctgaagctcagactgttattttccagttccaaataccaaaactggctaggcacggtggctcatgcctgtaatcccagcactttgggagaccaaggcgggtggatcacttgaagtcaggagttcaagaccagcctggccaacatggtaaaaccccatctctacaaaaaatacaaaaattagccagacatggtggcgtgcacctgtagtcccagctactcaaggagaacccagctacccagctactgaggcacgagaatcacttaaacctgggaggtggaggttgcagtgagccgagatcgcaccactcctctctaggctaggcaacaagtgtgagactctgtctcaaaaataataaataaataaaataaaataaaaattaaaaccaaatgccaaaaccaacccacaaaataaaccttggttaaagtagcctgttcattttgctttaactatgtatattgcaccagattctgccaggggctcagcgtataaagatgagacccctgccctgccagacaggtgggatgatggccataccttgagttagtcaaggcaccatctggctgtgtaacaaaagctaaaacatcagaggctgagcagcactcggacccacgtcccagtccaagtgtcagtcgttatgggggcccaggacagcccggacctagttcattcctttggtgcatcctcgacacacagcttccatctcttgagctgagatggttccagctcctgccgtcatgtctgcactccagccagagggaagggaagaagggagaggggaaagggcaagtgtccctctttatttttaagggcatgacctgaaagttaaacacttcagctccttcccactggccagaacccagttgtatggccgctcctgtcatcagggaggctgagcaatgtattcttcagctgggcttccctgtgcacaaccaaaacttcagttactatagaaaaaagggagctcagatattggggaaacaactagcatctgtaccacatgcactgatagctctctttgtatgaacagagctgtggcaggccctatgccagggagaaagtaagattggaaaagagcttaccaaggaggtggcatttgcactgtgcttaaggggcaagaaaaacgtcttccaatcaggagccacaaatgcttggctgaagtgctactgctctttcatcctggagctggaacagacgtcaccagtcaatcatgatggctgctgggtgcactggctaacatctataatcccagcactttgtgaggctgagggtgggaagattgcttggggccaggagtttgagaccagtttgggcaaattgcaagaccctgtctctgcaaaaaaatataaaatgtagctgagtgtggtggcacctgtagacccagccccagctactcgagaggctgagatgggaggatcgcttgggcctaggagttcgaggctgcagtgagctatgattgcaccactgcactccagcctgggtgacagagcaggacctgtctctaaaaacaataaaataaaatcaaagttttaaaatggaaaaaaaatcatgagcacataactccagatgtatcctcaagatagcaaacccgggtgggcgcagtggctcatgcctgtaatcctggcactttgggaggccaaggtgggtggatcacctgaggtcaggagtttgagactagcctggccaacagccccatctgtactacaaatacaaaattagctgggcatggtggtgggcacctgtgatcccagctacttggaaggctgaggcaggagaattgcttgaacccaggaggcggaggttgcagtgagccaagatcacaccattgcactccagcctggagaaaaaaagcaaaactctgtctcaaaaaaaaaaaaaaaaagcaaacccagggccaggtctgtagccacatggccaccttcttccctgagcatggaggcagcctcagaaacctgccccacatcacatcagtgggcagttgattgggtcagcctgccagttgaaccctatttgccacagtcattctccatagtaaggggcattctagacataccccccttcccagggaagaataagccgtagctgcctgagcgttttatccagtggtgtgcatgtcttttcccaactctgtgtttagtgatgtcctgtttgtagcttgaaatttgccacagtgggtgtgtttacaccacaggaattggcaaacactacatatcaggccttacctcctgctccctactagggtaggttgttttttttttgttgtttttgttttttgtttctttttttttttgagacggagtctcgctctgtcgcccaggctggcgtggagtgatgcgatctccgctcactgcaagctccgcctccctggttcacaccattctcctgcctgagcttccagaatagctgggactacaggcgcccgccaccacacccggctaattttttgtatttttagtagagacggggtttcaccgtgttagccaggatggtctcgatctcctgacctcgcaatctgccctcctcggcctcccaaaatgctggcattatgccactgcgcccggcctagggtaggttgttagaaatgtaccagcctgccagtttcagccttgtttgtctttcatcctttttttttttttttttttttttgagacggggtctctctctgttgccccccaggctggagtgcagtggtgtgatcctggctcactgcaacctctgcctcctgggatcaagtgattctcctgcctcagcctcccaagtagctgggattacaggtgcccaccaccacgtccagctaaattttgtatttttagtagagatggggtttcaccacattggccaggctggtatcgaactccttacctaaggtgatccacccgccttggcctcccaaagtgctgggattacaggcgtgagccaccgcactgggcctctttcgttctttcttaatgaaaatcttcctgaaagatttgcctactgatgtctgtgtcaataggtactgcctgcgggacagagcctgccctccttttgaaggtctttctctgtctgggtgaccatctgcatgtcactccctgctgctcagaactaaagatgtagctatgcctggggtaggttgggaaaacctgtgggaatcacagagcttgctgtcatgctgtgttctggatacctgaagcttggcaggcaggtgggatcgagggtgggcattaggaaagtgatgtggctctataggaaggggacataggtcctgagattttaggtccccaattggacaaagctgttttttttttctggataaatgttctagcttattcataatcgagtggtcagttttcttttcttttcttttctttttttttttgagatggagtctcgctctttcgcccaggctggagtgcagtggcgctatctcggctcactgcaagctccgcctcccaggttcacgccattctcccgcctcagcctccggagtagctgggactacaggcgcctgccaccgcgtccggctaattttttgtatttttagtagagacagggtttcaccgtgttagccaggatggtctcgatctcttgacctcgtgatccgcccgcctcggcctcccaaagtgctgggattacaggcgtgagccaccgcgcccggccaagtggtcagttttctcagctgccgggtcttgcacaccttgctggctctggagaccatatgcaccatgtagaccccatttgtttcctaccctcagtgttgggggaggggccaagggcctgtcgatgtgttgacacctggccattcactggccttgaatgtccacattcacctccttgaaatcgatgccccgtatcggaggctccatgtggatttgggggcagaggcctgtactccagatggtggggtggccttcaccaatcaggcagattccctgccctgccctgccctttgggctctgtagctccagatgtgtgctcaagatctgtggccacatggatgggacaagccacagagactcagactccgtggtccctgtgaccagagtagccgtggccctgtctgggaatgttcccaccctgttgctgaaggtgagaaatttctctgtgctggagaacagctgtgctgagaagttggcccatctggcttgcaggactgctggggcaagggaggtctgctgccggtctcttccttcctcctctgactgggtgctccttgtctaggttccttgcagcaaaagaattctctaatttattttgttcccttattgagtctctactccatgaagcccacctcctaatcccagctgactggctcccacctcctcaagaggaaggccaggggcagacgaggctgaaggaggctgactcccctgtgccttcgcagtctgagctgatgctgctgtatgttcacagggctccttcagcttttaaaaaggcttcaacacgttcgtcacacgcttgtggctctcctggatgccacactaactcagtaaggcctgagttagaggctgttcctgaggctgtgaaaatagaagaagggtccagaggagaatcccttcatctgacgatcccaggaaggcttcctagaagaagcagcctctgagctgagacctgaagacagatcaggcctgagtcaggccagggagggtgtgaggggcccaccaggcagagggaacaggatagggcaggcacagaggtctggcacctggcttgtggggaagtgtgagcccctgggcatgaccaaggcggggagaagtggcgtgagaggaggcagatgtggctggcaggagatcggcggccccggccttgctgagctccactctgtatgcaccaggtgacagaggctgcccaggacggtgggcagggaagtgacaggtcacatggtcatcccaccaacagccgggagtccagcttggggggacccaagaccctggggaaggcacgagtcaggggcctgctagagccaggagctagtgggagaaggaaacagtgttgcttatgaattataaacagacactcccgcaactttctctgacgtgatacaatctcaaagtgggccacccagaggtgggaaggtgacttctggctctccaggccttgggcctgtcttttttttttttttttttttttttttgagatggagtctcactctgttgcccaggctggagtgcagtggtgtaatcttggctcactaccacctctgcctcctgcgttcaagcaatcctcctgcctcagcctcctgagtagctgggattacaggcacctgccaccacacccggctaatttttgtatttttagtagagatggtgtttcaccatgttggccaggctggtctcgaattcctgacctcaggtgatccgcccaccttggcctcccaaagtgctgggattacaggcatgagccactgtgcccagccgagcccatcttcaagttctccctggccctcagtgtttctgtattagttcacccttttggctccctgcttttaagagtctcccttaagactgtccccaagtggacaggtccccagaaccaaggagcagccttaggagtccccagttacagacactccagggggtccgtgtggccctcagcctctggcctggttccggcagccttggtcctttgtgctgtctctcacatagcctggccagagctggccaggtcccttggctgggccgagtcatcgtggccagtgactcatgcagggggagaaaagtgaggagggggaacagagtgcgagggggactgtgttaataacaaacccattaggtccctgaggtcacttcacaggagggacaaatggttcatttaggttgatctggctgccggctggcttccagagacactcagggtggggaagatttcattatctggggaaagcaataccagattgtctggaggggcccagccagcgcaccccgcgcttcctgtctgcctcccacgcagagcgttctgttcccaaggcggcaggccaagagcgcgagccgaggctcaggtgcaaagaggggtgcggcatgggggcactgcagggcacggggtgcatgcatttttatttatttttttactgagtgttagggtaatttgttaatggggtatatttggtgacataaaaccttctgtcgattcatggcagtctggaacggagtggaagcgtcccactcctggggaacccccacacacatttggctgtgaacgtcggtgcctttgcactggagcctctttggagtgtgctgggcagagcggagaggttcctcttctctcttctccatcatcctgtggaggtgtcaacatgtagccagagatggtcagtggcagtgaggagaggggggcaggaagagaccagggctgggggcttgccagcccacagttctacccctgaacacccatggcctccctgttcaggtcagcgaggctgggggcagagacgggcaggggtcccccaatgttgggcatctccccgctccctcatactctggatttgccctctggagaaagctctggagcacccagaagtcctggggctgctggctgaggtggggagcagagcccagctgtgcctggaggctccccacttccactcagcttccagggacagtctcagctgtgcaggcccaggccgctgaggctggctccagaaatttcttcacaaccaccactggatggaaaaccagttctctaaagggccccagagccagttttgtttcttcttccacaggttcccatagttagagcatcgggtctttgttagagatgcagaagagacgatgtccccagcccttatgtggttcggtctccactgtggatgttggtgatcttagtctccttctcaaaaccaagagggctgatgccccacattccaggcccccagaaagagccgccacccacccacaccgctacatcttctttccacttttctgttccggaaagagtagagtggatatgcgctcctgtagaaatccatctacagcctgactgcagatgtattttgctcccttattgagtctctgctccatgaagcctgccttgtttgtacctctttctctctctttctctctttcttccctctcttccttcccttccgttcccttcctttttctttccttcctgtcttattctttcctctttctttctttcctctctctctctttccccctttctctgtctttcctatcttttctttctctctctttcctcttttttgaacagccaaagatagaatgaatggcataggtaggtactgagctccctgtaactggaggtgttcaagtgtagggtggatgggcatttatagggcaggcattgaggaaggatctccctgggattgtggatggcaggacaggccctgtggagccttctgagcgggtgcagaagagggagggcatgttcctgctccctgcccttcccgggttgccaggccgccactcccaacctccaccctctttccttccacctgctgggccttacgggatgggcagaggcattgttagaacatggagccgcggtccacagagggccagcagggaggagagctccctggggaccacgtcgcctcagtcactgtggtgactttgaaaataaatgctttcttctctgcttgagtccctgttgttcctgctgacgtggaactagggcaggctggtgactcagccctcatccctgcactgcatcggtggcaagttgcctccagcctcagaccccacagagcagggtgccttcttcagaaaaacagtagggaggccaggacaccaagggccccagggacagcctgtttctcctggctggcatgagttctagccaagcctcctggtaccctgggggtgaggaggtaccagctgtgtgctttagtcactggctgctttgaggctgggtcggtgccaggctggccactccttcttgtcccctagtgtgactttgcagagctcccggaagggtcagagggtttttttccatcactggtgtccatgggatactgtgtccccatctcatttttgtactccagtctcagacgggtgctaggaagttggagactttagccatttcacgactgtgtcttgcggggctggagtaggaacaggagtaggaggaacgctctggtcatgggactgtgtgaagagagaaggatcaggaagaaaacatgagctatcatgtctgggttatacctcagcagagccgctggtggcctcccaggcatctgaatttactaatcacaaagctcaccaggtgtgcaaataaacaaatgctgttcaggaggcacagccagggttctgctggagagggatcatcttggaggggtcatactttccacccagtccttcagtccttctgtcctgtgtgtgtgcagcccctgaccaccaccatccctgcccctgccacttgctcccagggttccatcaggttggatgttattgcaataaaatgtagcaacagaaggtccaggcagtgctgcagtccctggtggtatcatcagagccagcaggcagcagggctggggaactccaagctgattcagtcccaagtgccggagcggggagctcggatgaggtgggggtggggaaccggggagccatggagcagagcatttgctgtgctgaaggccaggagcctccttgggagatcatgaatttagaacactaatactttgtttaaaaagtcccctgccttggagataagagctcaggccgctgtggtcaggttttgctgtaaatgttctgcacaaagcaggctggggggatcactgggaagtctggggaacagattggtcatgtgcttctttgagtgaaaccttatggttgcattgaagcggccaggcagagggtgtgatggggtgtggtagctgcacaccggctcagtcaggctgaatggggaaatgcaaactcaggtggcctgaaagagacttagtggtccacagcctggtggctgctcccagtacaggtgatgtaaagagagaaggggttccgggggcttggcccaggtggaaaccatgcactgtctgtgatcctgggcatgtcgaggctggagcaggtctgcttggtggctggcagaacgcacatgaagaatccatgtgtgttctgaacgtcccctctgcccctttgggctcatgccccatcaggagtctcccgactctgccattctgcaaaggaaactgcgctttgtcattgcacaggatcgaacaggtgtgtgtggagtccctaaagccactgtctcaaggggtctcatgggacaatgggagagttgctgtgatgtttaagactaaagtgatggctgggcgcagtggctcacgtctgtaatcccagcactttgggaggctgaggaggatggatcacttgaggccaggagttcgagactaccctggccaacacggtgaaaccccatctctactaaaaaaacaaaaattagccgggcatggtagcgggtgcctgtaatcccagctactcgggaggctgaggcaggagaattgctccgatctgggaggcggaggttgcagtgagccgagatcacgccactacactacagcccgggcgacagagtgagactgtctaaaataataataatgctaataataaataaaataataataataaaataataaaagcaaggacttgaacaaatatttgcacacccatgtttgtagcagctttactctcaattgctcaaatgtggaaggaatggatatacaaagtgtgtgtacacacagtggaatatcattcagccttcaaaaggaacggaattctgtcactacatgtgaaccttgaataatgaaccttgaagacctcatgctacgtaagcctgtctcacaaggacaaatattgtatgatttcacttatgtgaagtcaaattcatagagaaattggaatgacggttgccagcagctaggggaaggaaggatggggagttattgtttaatgaggacagagtttcagtttgggaagttggaagaagtttcggaggtggatggtgttgatgggtgtacaatgtgaatgtacttaatgtcactaacatggaaacttggttaaaatggtaaatttgtcttttttgtttttgttttttttttttttgagacggagtctcgctctgtcgcccaggctggagtgcactggcgtgatcttggctcactgtaacctccgcctcccaggttcaggcgattctcgtgcctcagcctcccagagagctgggattataggcgtttgccaccacgcccggctgatttttgtatttttagtagagacagggtttcaccatgttggccaggctggtcttgaactcctgacctcaggtgatccacccaccttggccttccaaagtgctgggattacaggcgtgagccatggtggctggccaaaaatggtaaattttatattacatatattttatcacagtaaaaatgcattgctctattagaaaaatgatagatttttacaatatgaattaaattacaagttatgaaggaaaaattaagcaaaacattaaaaaattacttataagtaattatatttaaaacaaaagataataaatacacaactttcatcacctcttaggttttttgcaacatttaactattgtctgtcctgttgcggttatgttcttgaggttgtatttgtatgatagaaacactatattcgtggtgactaaacatctcttctcagtctcacctccaatgatgtcatacagataacttgaaattggccggctgggcacgatggctcatgcctgtaatcccagcactttgggaggccaaggcaggcagatcatctgagttcaaaaccagcctggccagcagggtgaatcctcatctctagtaaaaatacaaaaattagccaggagtggtggcgggtgcctgtaatccgagctacttgggaggctgaggcaggagaatcacttgaacctgggaggtggagtttgcagtgagccaggattgccccactgcactccagaccgggtgacagagtgagaccctgtcaaaaaagaaaagaaaagaaagaaattggccaaggcaggaatattgacaccacaggaataggcaagcgctacaaatcgggaaactgagtgttgttgcttttgctggccccaggtggccggttgttgaccgttaactggcacactactggaggagggaggttcagactgattcgcagagagactagaggtagaaacgcaccatggtttggatgctgagggtgagggaaagagaggagtcaacagtggtgcccggagacttggcttgagcaactaggtggatggtagcaccgtttcctaagatgaggggctgtgggaacttgaggggctgtggaaggctctgccactgacggacccagggctcggcagctctgggaggcctactttgtgtcaggccacgcagagataagaccatctgggccctgcccttgggaagtctctgtctatgaggacacagcctgccacctaatggggtgtcccgtctggagcctcagtgttgctgggagaaagcccctcaccttccttcgctctccgagcctcttttgcttccctgccagctgagcctctccatggaggctgtgcctggaggggggtcatggatatggatgtgtgcgccaaacgctgcttcctcgtggatttcctccccactccgttcccacgctttgtaagcttcatttccccggggcctgacctgtggggtttctctccagacctgctccttcccatttccagaaaggcgtgcaggggtttcctatggctctcttccctgtccccatcccccttcccttgggacagtgatctgctggacgggtgggctacccacagggtttgtgattgcttagacatctttgctgtatgaagctttgacctcaaggcatgatgcagatgggaataaggcacgagtttctcctggctgctgtaacaactgtcgaaactgggtggcttatagcaaggggaatgtgtcctctcacagttctggaggccagaagtctgaaatcaaggtgccagcagggccagcttcctctgaagactccaggggaaaacctttctttgcctcttccagcttctggtggccccaggtgttccttggcctgtggctgcatcactccggtctctgcctctgtcttcacaaggcctttttctgtgtctctgtactttcttttctgtctcttagaaggacacagcattgaatttagggcccaccttatcttgagatccttgcctaaattctttctgcagagacccttaaacagaatcaggtcacatttgaggttccaagtgggcatatctttgttttgggggggatcaccggcccactgtaggtctcgttgtgcactgaagacgcaggcggtccctttggccaggcctgcagtcggtcttgccttcttttgtgaccgtggaagaatgcaccttgctggatgcacaggcctttatagttcttttgttcttgccaaatttcagctcagtttcctctctgctgccggcgtgcatcttctctgcccagtgccccttctgggactgtgtgtccaggccctgaggccctagaaaaggggggtggagggcctcctcactatcctgtagcaatgaggcctcattaaaatcctggagccccagactggacccagcccttagctatgatcaaaggacagctcgggatatgattaaagggctagagaaagatgatttaggctgagaaagaggaggccaaggagcaactggattgtccttgaatgtggaaaaggtaattatgacttgaagggtggtgcccagctgtttcccatctcctctgaggacaggaaaaaaaaggaaataaatgatgtacaattagagcagttggttagatacgagggtgaacttcctggctgggagtatggccaagccctgatttgggtttcctgaaagagctcggggaacctccttacctggaggtttctaggcctggtcatgtggctctgagtgattacattgaaggggcagtggctggggctggagccggtgggctctgagcacagtcacgaaggcatgcgcactttctggctgctctcctgccattgtcccttgggttcccattttggtgaggcgtgcaccctggcggcgctccccagggaactaaatatgtttgctgcactgtgcgtggagatggagaatgtacaattggctgaccctgtgctaatctggtggaactccatgccagccctgggaaagaacaattgcatgggtgtgtccacactcaccaggtgctttttagaaaaacactcgagaataatgctgtggcttaggatggctgttgtgccggacccggcatcttcccaggggggctgtgttgttgggctgagtttcttaggtactggacccccaaatccccaaatacggcgtggacaggtggcccagtaggggctggactatccgataggcccaggtgctggagttcagacaagacataccctggcctggcgtggaagatacggggtgctattaatggcagcaatggctgcatttctgaaacccgggctcccaggccgacgagggtgtgcacgcatctgaaatgtctgtggttttgcagttcccatgtccacaaactcacttggttgaaaatagttcaaaatatccaaagcatgagggagggagtgcctgcttttcttaaaaaggaaggacttgatttcatctacttaaaaagccacccaaacctagaacattttccgcaagagaccccctgccccccgcctctccagaatggctggagagtctcagcactcctgcacatttgggatatttcagagggggtggggaggggcaagtgggcagcgagcgacctcagacccaggatgagctgtcaggcgctccccggccacacattcaagggaccggagtgcagttgtagcgttgcggcctgctgcttcgggggtgggggtgttgttccatgctgtgaattctcacatggcccctgactctgggcagaggccgagggtctaagggacggggtgacagggagagcatgcaggagtgggtttctggctttccagggcgagtggaagaagcgcctctctctcttgtaggtgacagacctggggggcccttcttgaggatgagagcctgttgcttctcaagttctgtgtctaacccaggtccccaggtctaccccagcccctcggccctgcctgccttgtggatgatatagtttaagggtagagaccgctggcctggagggaaggctaggcctcaggttagggcccagaagggagggagaagcccttggggcagctccctttctgctcactcactgcctagctccttccttcacaccttccttcggaaacgtctgctcctgacaaggtctacttcctgctctcaggaggcccttattgtggaggaagggaggcgtcgcccgtccctggcttctctgacagccgtgttccatccccgccctgtgccccttctcccggacagtgccttctccagggctcacccaggagggtgcagcggtggcccccggggcggtggtcgtggtgggggtgttagctgcaggggtgccctcggtgggtgggagttggtggcctctcgctggtgccatgggactcgcatgttcgccctgcgcccctcggctcttgagcccacaggccgggatcctgcctgccagccgcgtgcgctgccgtttaacccttgcaggcgcagagcgcgcggcggcggtgacagagaactttgtttggctgcccaaatacagcctcctgcagaaggaccctgcgcccggggaaggggaggaatctcttcccctctgggcgcccgccctcctcgccatggcccggcctccacatccgcccacatctggccgcagcggggcgcccggggggaggggctgaggccgcgtctctcgccgtcccctgggcgcgggccaggcggggaggaggggggcgctccggtcgtgtgcccaggactgtcccccagcggccactcgggccccagccccccaggcctggccttgacaggcgggcggagcagccagtgcgagacagggaggccggtgcgggtgcgggaacctgatccgcccgggaggcgggggcggggcgggggcgcagcgcgcggggaggggccggcgcccgccttcctcccccattcattcagctgagccagggggcctaggggctcctccggcggctagctctgcactgcaggagcgcgggcgcggcgccccagccagcgcgcagggcccgggccccgccgggggcgcttcctcgccgctgccctccgcgcgacccgctgcccaccagccatcatgtcggaccccgcggtcaacgcgcagctggatgggatcatttcggacttcgaaggtgggtgctgggctggctgctgcggccgcggacgtgctggagaggaccctgcgggtgggcctggcgcgggacgggggtgcgctgaggggagacgggagtgcgctgaggggagacgggacccctaatccaggcgccctcccgctgagagcgccgcgcgcccccggccccgtgcccgcgccgcctacgtgggggaccctgttaggggcacccgcgtagaccctgcgcgccctcacaggaccctgtgctcgttctgcgcactgccgcctgggtttccttccttttattgttgtttgtgtttgccaagcgacagcgacctcctcgagggctcgcgaggctgcctcggaactctccaggacgcacagtttcactctgggaaatccatcggtcccctccctttggctctccccggcggctctcgggccccgcttggacccggcaacgggatagggaggtcgttcctcacctccgactgagtggacagccgcgtcctgctcgggtggacagccctcccctcccccacgccagtttcggggccgccaagttgtgcagcccgtgggccgggagcaccgaacggacacagcccaggtcgtggcagggtctagagtgggatgtcccatggcccccatccaggcctggggatatcctcatccgcctcccagaatcgggccgtgggggacagaaggggcctgcgtgcgggcagggagagtattttggctctctcctgtcttcggggtttacaaagtgtgttgggacttgcggggctgctctgtccaagcctgggtctggcgtccgcgtctctgagcctgtgagtgcgtgcgctttcctgcgtcctcttgactgccggtgctggggctctgcgtcctgcgtccgcgggagtaaatacagcaggcgaaggggaagctcacacaatggtctccagcgctctggggcagggcttctgaggggcgggcctgcctctgccgggacctggagcccccgcccctcggagaggctcctaggctgacttgggcagagccctctggtgggccgggagggggaaaggctgtgttgaaatgagcaaactgtccaggtgtcaggccaagctgggaggtgaccagcctgaggtcctccccgctccatggccagaaccagggctgacatctgggtgtcctgagcccagctgcccacacggcccacctggggtcagccctatctgagtgggggaggcggggcctcctgggggaccagaactttggctggacgccaagcagagtgccagtggctgttcttcagggctgggcctgaggagggtgtggggcggcgaagggacgggagggggttgtgatccagtggccactggcgctgtgcagagtgtgagctggaaacatcgtagttactttgtcagcttagtggtgaaagccctttttcaggctctatccctttgcatccctgcttcccagagggaggggaggtctgggtctgcagagctgggagggcttgctgttcccgcccccctcccccacaacacctcctcatctggacatctttgggcacatgctcatactggggtctccctaggtccactgtgttccgttgagcctcctgcagtccccgagtgaatgtgacctccctgcccctgcctctttgcaactcctccctgcgaccgctcctccaggggccttccttgtcccaaatgtccaagtggcacgacttagccggtctgaccactttccagtaagcccttatggagagaggccctgtgttgtgcagagctctcctcctgcctgcgggatcgaggtctctgctctcagttcctaacagaaagtgtcgggcccccagtgggatttctggggaagaactctcgtgtctcaacgggagccctgtggcgggaggggaggccagggtttggggttgtgttcgttgtacagctgtcaccatttgcactatgaaagttgttagtgccccttccttgggtctctgggtgtaactccacccttgcccccatgtgcctccatctggagctgcttctgcggctgtctcccaagccagttttgtgaccctgtaatttagtccaagacaatgggctcattgagaccatcctggtgcagcagttggcaatcctttggctctgggggaaggtttctcagtctcggggagtggggcctcaatctgctggttccctgtgtttatcagtctcccccttgtgtgtcctgaatggttttgctgggaattctggtcttagagccatcaggtggcccgagtcgataggcgtgagagagtgtgtgtgtgcatgagtgcgcatgtgcatgggggctgacctggggtatggaaaggtggccctccctggtgcccaaggagcctggagtatagttggagggtgtgggggtgtgtatatgggagttggacaaccttgggtggacagacagacgtggggaagggatgattgaaggaggtggaggagagagtgtgattcagcccagccaggggtgatgtggacaggcagcttccgaatcagggtagagaaaagtcaccactagctagcaggggagaagtcagtatggaggaggcggaccttgagggagagtaggaattggattgcaagaggaaggagagccttctggccagcagcagccagcagcagtgggggaggctggaatgagctggctggagagggggctggggcataaggaggggcctgcctgtgaagatcatatgggccaggctgcggagggccaggcatgcccgccgggagtgcagctggtccacgggaagcatctggagtggctgggaatgggcgcaggagcagcgccgtgggagcacaggtctctttcccggggcggctcacctggtgtcttggttcctgcaaggtaggccgaaagggtggggaggaaactgccagctccttacagcgctgggatggtggccccagggttcctgaggccagcggatgtgggtgcctgtcaccatgtgggttgctgaggggcggagactccaggggccaccccaaagcaggacgagctctgagccacggcatctctgggggcagttttccaatcgagcagacgtctaggcctggaatcctgtaacagaggccacagggccctgatcagggtgttctgggaggcttagaactagtggcagtatacagggtagacggcaagtgacctggcatggggaaagaggcaggtgcccaggccggcacagcacacccgtaaggaacaggtagacgggaagccgtccgtgggcctgtgtgtgtgctcggagttaaaattctgccaatgtcccatgtcctgggcacatctaccccctccctggggagcacctttctcttcaccttttccttccccgcctgtccccttcacccagggccttccccatccctcccgtcttggggaccgagggcaccatggctttatgttccatcaccgatgagttgcacagggattcagtccttccgctgttcaggccgggtccttcaggctcagggttcccaggaatggagagggtatcagtgtcttccatggactcaaacttcccgcatcccgcctttgctcccccttcaagataggtctccgagcttcaaggttttagggctctgtggaggccgccacgtagcagcaaggagaatgttttgtatttggctgatgagatttttagagtctcattttctacttttccactgtacaaacgggcctccaggcgactgcagcacccgccactgcccgtaatagggtgacaagagggatgaccctttcctctttctcccttctggttggtggaggcacggggctggcggacggcatgtgctttcgtgaattcaggccaaatctgttatcgcaaacacgattacaactcgggtctttgtgtaacaaaagcctttccaagtaccagctgttggcctgctttgctcagcggtgtttgctgtaaccagatttgcacaccgagaaagaatccaaaagtccttgatgtttgttgaaacaatctggcccaggacccacgtgctcagatcccagagctgtgtggcatctgagcttctcccgagcccccactgtcgcccgaggaggacccccagatctgtgttctggaggcagagcaggctgtgggacgggcttctgggtgggaaggaccatgtggatatgccttcttgtctgagagtcccaacacctccgggacgtgggagctggcgcgctggcaggattcaggtgcctctttcctctctagagaaaaaggccccgttgcttggtaataggtgcagacctgtccctaattaatgccagtaggcctcttgcgtgatgaaccctgcctttcagccaagactcaaggcatcctgtgaatactgcctctctgcagtttgagcttttgtggtgggaggcaggagccatggggagtgggggcaggcctcttacacgggtcccacagccactggcagcactgacttgatgctctttgagttcagagcccagggccagacagacccactgtcccgactacgagttggttcatttagaggggggcggacacagcacccaggcagcagatgcactgtgatcagccttgcagcggggctgtgggttctctgggctggatgtccgggaagaggcaggtggaggtaaacgccaggacacccctgcagtgactgggtgactgcaggctggaaatgctttctgtgggctgtggctgtccaggaaggttttgaatggggctagtggacagagtttgcatccagaggggcagtgctttggaggagtgaggggtatggcagtgtagggatgcccaggccgccctcactctgccattggaaagctgggcggcttcggtttcttcagtttcttcgcctgtttccctgcctgcaaagtggggttagaaacagctctctttgagggttgctgggggactctgagatgcagcccatggcgctgagcacgggtcctgcctcctacgggtgtggtgggtgtcgcggctggtgtggcatctgggcgggaaaagggggcatttgcaaaggacaggtaggtttggatgcttaaatatgcagatctggggatgggaggtctcaggcaagggcctgtgtgatgccactgtatgaatgaggccggacagcatggtcaccactaattatggaaagcacggcagacactagtgccagtagcgcccgcctgggggtccctctgagcccgacaggtactcaggctcccagtgcagccatgggaccccccttttcctgcctggctgacattctggaggctggcgtcatgttggctgcaggttcctcttactgggaggttgtcctggtcttccctgccaccatctacccccacccccaccctggagtgtcacagatgggtggaccatatgcccatctgcagggccaagcgctgacaatgaggtgagcacttgctggatgaccggaccatgaggacagcgggggcgctggcagcctgcgttcggctctgcaggctggcctttccctgaaaagcggttgtggcagagtgtgcatcccagggagtggtgcctgctgccctgaacattctcatccagcaggcctctgcaagggcccagtcaagtgtggtgcagagctgggctggcagctggaacagtctcatcttgtctagtggtgagaccaagggctgatgggccaaggctgcgtgctgcttgcccagcccgtggacccatccactgagcacccccatacccctacactgggcccggggtgtcaggaggtggaggggggactgggtgcctggaaaaacaagcccaccgagagcctgagcccccaggggtcagtatcaggcagtcaccacggtgcccggtacacagtggccacctggtctcgtcggctgtcttggtggtggagagcgtgcatggtggccgtacgtgatgggcatcacccagggtaatacagatatgcagactgtgcatttgtctgtaggagccagggacttctcagcctggcaacctgtgacctctgcctacccgttgggagagaggtgctgttccctgatagcctggtgccgggagagcagaactagggtctcctcctcctttctccacctcccatttcttacatgcccaggcatcaggggaggtcacactcagggatgagtcttggccactgggttcagggcctcactgttgccatctcttccctttgccagccagccaaatgcccgtccatcatcgtgccggggatggggctggcctgctcctctgaagtctccttggtgtatagcctaggctggagccccggacgattccgccaccccctcccccgactttttctttttattttgattcatcccagaaacccagccaaaaaccaagttcctgtgctctcccttgacaaagccactgaggaaaaatggtcaaacactgcctttctttccaaagccctcttggtttttcccaaatttggaggctctgagttgcttatgagaccaaagggtccggaactctctggaacacagtcccagaagtgggaggatttgtcatctctccagccaaacagacccaccagttggcccctagacacccccaggcgcctggggcatttctgggctcaggctgtttaatttggtctgcagagccccgaggctccgtttagactgggccagcagacagttctagagacttcaagtttgttgtcgtttttaaaagtcctgccaatgcccagaaacttagagggacaagaagatgacctcgatgtcagccgggaccataaacagtgaggcccgcccccccccccacccatgcctgcctccactgctcccgtagctgggtctccaggggattgcccgtggccatgggggaggccgggaatgcggggctcagactctactgggcttctcgtatttttttgtttttccttgtccatcttctttctcggaaatttctgaatatccccctacagcctttggcattctgtcactcctggcatctctgggccaactgggaaagccatcatttgtccaatatccagaaaatcaaggggcctggccttaaatacattgcagtgccctcctccccacatggcatcgaatttcctgtgtcctcaaagccaggagcctgtgccttggatgtgggcgatggagccttgcagacacctggagcggctttcctgggagagtctccctcgccttcccatccacccgcttcccctcccctgccccaagctctggtcacagcctcggaggggtcatctgagtgtaggttgcctccaggtgtacagttggaggggggcagttaccccacatccccctgtctgctaggggcacccccagggactcaggtcttgagggacagcggaagggtggggtggggagtaggccgttgtctcgtgccacctgggtgttatgtagactctgaatgggcagttcctgggagctggtttttccttctcaccccttctacagtgctgcccctctgaggggctggagctctctggagccctttgcagcctgtggcaggtctttctgattctgtgcctggtttcgcagcctccaacccatagccagtggcatgaagaacattcctggctgtctctacctgtggcctttgcaggcagcagttccctggggcagggcctgggggtcctggcacctccttgtgggaccccttgggtatgagggagggagccacctgggccacagatagacccccttcctgtatccaggaggttcaggatggacctgtctcatctttctttctggtgggaagagagcattcctggccatggggaatgtggcctggacagagccacctagcctctcccctcccccaggcagggccctgaaagatggagatggctctgctcctgccaggtcaacagccagcagtctggtggatttccatgcagtccaggcaggatctccttctgtccccaccccccaccccatgtgcaggaagctggttccaagcagggacccttggccccgctttccacgtgggtgggcagtttccctgcgaggggcaggccaggcccctgccctatgtcccccagagaccgatgttatctacagtaagagcatacaagtctttttggctccaaaccaggcctggaggggtggtcttctcctctgtcctctgcctcttgccccccattaaaggtcagggaatggagtgctctgtatgtttgctggggttgggttttttcctttggtttaaaatgaagggctggaatccctggtgcagactgcacggtgagaggtgctccttgggatccactcgaggagcattactgctgaatgccctgccaggccaggagcatcgctgggggtgggagaggcagttggcttatttgtttatccaacagccatccatgggtaccccaagggccagctctgttctaggcactgggggtctaggcatgggctcaggagaaggggtagaacgggagggcttcctggaggaaggcttcctaaccagagaccggggtaggagtttgccaggcaggtgatgctggccagcttctcttgccattttccttttctttttttctttttctttctttctttttttttgagacagagtttcgctcttgttgcccaggctgcagtgcagtggcgtgatctcggctcactgcatcctccgcctcctgggttcaagcgattctcctgcctcagcctcctgagtagctgagactccaggcacgcaccaccacgcccagctaattttttgtatttttagtagagacaaggtttcatcctgttggccaggctggtctcaaactccttacctcaggtgatccgcccaccttggcttcccaaagtgctgggattacaggtgtgagccactgcgctcggccttctcttgccatttctgcagactcatagtgtgtgtggaagactgtatgtctgtgcctggcacagctgccctcggcactcaggtgggaggtgggggagagggctgttggtgccagcacaggtcatggcatgagacaggctcccgcagccaagcggggtgcaccgcagcattggaggggccctgctgcgcacgagatccaggctctgcatctgtcctcctccccaggaggcctggagggctgggagggaccagggtggtgaaataacccaggtgggagagaggcactgttggagaggcagagggagctgcaggtttgtagcagcgagctttaaaccctgggcctccaccagaaaacctcagaaagggctgctttgcttttttttctaaactacaaaagaaacccttggccgcctgggccccttggggtcgggtgggggaggagatccttcattcgcacctttgcaggcccagtactgtgcagagggaggagggtggaggcaaaggcgagggaggagggtggaagcaaaggcggggtccctccctagccccgctgccctgcctggttgctgctctcagacccctactcctggcccggaaacatggaatcttgggacagctggggtagggggcacagaacggagaccctggtgagggaggaactctttctccagccctggctgtggccacagcaaggccaggctgggaggacctcactcaaatatttacatctctcctaatatttaaatgatgaagcaggctcctgcacacagctgccctggagccagctgttgcctgccctaccctccctctctccctccctctttctttccctccctctttctctccctccctccttctctccctccctccctcttgcattctttgtctctgacccaagtccaggcccttccagctgttctctccttacccacaggcacctcctgtgactgagcttctccttgttatttttcataaccatttcctttaattgagcacctcctaggtgccaggccctgggctggtactttgtatacaaggtgtcttttaatccccacgagagcccaacaaggtagattgggctgctgaggctccagcgctggaaggccggcccgggtcctcccagtccgcacctgcatccatccatcactcccccactgtggagacctgttccctggcccctggctgagcacgatggaaatctctgtctactagtccttggagagtggggatggctgagggtcccgaccctggggtctgacgggggctgcctctgccccacttcagcctggctgctcttccactcaatgactgagtttgcaaaaccagaataacagtgctacctggctggtactttgggtggctgggaggcgtgggagagggtgcacggaggggctgagcgaggtgtcagcatcgtggggatctccgagggtagccttcccaggcccagggcggagtgtaggcagagggcgcgatggcccagcgtgccggctcacatctggccttgcccttgcccacacggcaatgtgggggagtcatcagcctctcagtgcctcagtttcccatctgtgcaatggggacaagagtaaatcactgtcttcaggtatggtaagcactcatacacattgactattgcagaatgaacacagtgagcccttcttaggcttctactacatgccaggcagggtgccaggccctagtggagaggggacaatgatgggcaagctggctcctgccctcaagggctgtcgagcagggaggaaggcggcggctgccctgactgtgacccggagtggggtgattcgcaaagaggctggcgggaggctggctgggggctggctgggggctgctccctctcctgcctgtgttccgtggcagggtattaaactggcttttttcatggatttccgaggccctgactgtgggacctcgggcaggttttgggaccttgtgactttgttcccgcttgtcattcaggcctttgtcctcagcagtgcccagcacacggcgacttctgcatgtccttcagtgtgtgactgaccctggagctgagacttggcagctgaggctggacattgtccttggataactcccggggaggtgggggcagggtggggctgtgagctggcaactccgagtccctagcagcctccgaatggaggctttcctcttgtaggattctcggggaggaaggaggggatgggggagatgaggcttgtgagtcttcaggagggcagaggttcacacctgcagcgccccagaaacactccggggtgcccaggcttacccagccctcctgagccagaaccaccaagagttggggaccagcagtccattttttagcaagatccagaaatgattctcctgaacagtccgagccaagaatgacatatctggaatcagaacatcagaactacagaggaatcgagagaacgggcccaaaatgtgtagggacctcagccacatggcgccacatggaggaaagcacccaacatcatcactgtatgaacctgtttaaacacacacacacacacacacacacacacacacacacacacacacactccccagtaaagagtggaaagacatttgtcagaatattgatggaagttacctgggttgtgggtttatagattttttccctttgtttttgtgcattttgcaaattttcggctttgtgcctaaattccttttacagtcaggaacaaagcaatagatgttattttttaaagttcatgggctcgtgcccgtaatcccaacactctgggaggctgaggcaggaggattccttaagcccaggagtttgagaccagcctgggcaacatagggagacccccacctttttttttttttttttttgacagagtttcactgtgtcccaggctgaagtggcggtggcacgttcttggttcactgcaacctctgcctcccaggttcaggtgattctcatgcctcagcctcctgagtagctggattacagacactcatatttgtaggatttgagaatcctacaagaggaaagcctccattcggaggctgctggggacttggagttgccagctcacatattttttagtagagacagggtttcaccatgttgaccaggctggtctcaaactcctgtcctcaagtgatccatccatctcggcctcccaaggttccaggattacaggcgtgagccactgcgcccggccatgggagaccccctcttaaaacaagaataaaaataaaaataaataaaagtttactgtcaaaaagaaaaacacatcacccaacctaatctccccctaggattgagagatgaggaagcagaggccggaaagtgtcacattccctggtcgctggcagtcaggggacctgaggcctgggctggttttctcgtgctccaggcctggggtgtcaggtggagcccctgctttgcccaaaggtctaggtgcctctgccagcactgcttgcttctgcatttttggccacaaggaatgtgggccaaaggcagggtccttgacctctgcccaggagggtgaagtgggctggtcctccttgtccctgctccaaggcccctgcggctgtgcctttggaaactgctggcccgagctagtgtgcggagctgggacagacctcaccgtggccctcgtggggtcattccatgtccgggctggaagggatctttcggtccagcccttcctgttcctcatcaggaaactgagaccagagaggtcatctgcctggcccggggtggggtgtagatggcgcttgtgactcctgcatgccacgtgcagacagtccctcagctgtgggcttcccacgcaagcagccatgctggggataacttggctgaaacctgcgatttaatgaagagaagaatgactcctcctgcagccctgtgccccacaggctccctcctgcccccacccctcctgcagaggggcctcatgctggtgggtgggtccctgttgctgcaatgggcccaggcagtttctgggcagtggaggcttggctgtcttcctgcccaatgtcccctgtagcccacgctgtccgggaagggcggggaagcactcagccactggggacttcacaagatgggtatctgggagatgctgattggcaggccaggctcccgtggcccacaggcaggtcagaggtcacagtgctgagctgggctgagttggcagctcagggcagtgggggtgggggtaccttgctcagccatgggcctctctggcacaagggtttggagtttactgtaaacaactccttcagtttttccttctctcataggccaccagcagaattgaggggccctctgttgatgaggtgtggcctgggaggggctagttgtctgtccacctgatccttgcggacaggtgaccacaggcttcctgccccagggggctgggggaaagatcggggaggcctctctggcttccccacttggaaggaaaatacgggcataggggagacactttacagggacacatttcagccagtaccctctggctgtgctgggggcacagtgcctgccctgcccacaagaggggtcagttctctccaggatttaacttcagccttcagtgcagggcagatgagcactcagaggcccagaggactcatatcacgagagagaagctgtgaccacacaggcactgaaggttaagcagaagagtgggacacacgggtgacctgaaagtcccagggtcagtgtggttagccccagatagctggggagctttgggtaccaggcttagcaggggaggagggcccccgtgacagtttgctggggctgctgcaacaaagccccacgaactttgggggctgaagatggttctagaggccagaagtccaaaatcaaggtgtcgaccaggctgatcctttggggcctctgcgggaggctccggcccaggcctctctcccagcttctggtggctcccgggtgctcctgggcatgtagatgcgtcacgccactccctgctccgtcttcacatggccttttctctgtgtctctgtgtctcgtaaggatgcttgtcattgcatttagagcccaccctaaatccaggatactctcctcttgagatcctttattgcatctgcaaagaccctattccaactcctgtcacattcacaggtccgagggctagggctctggcatgtcttttgggggtcactattcagtccactgcggcagctgatcttaggggaagcagaatgttctaagcttggggtgagcggagggaacgctgctgggtggggagtgggagaccaggctcggagacaccgcggatctcctctgtctgatgagggcgtgatgaggttctcatctcaggtcctctgaatggcggctgcttctgaggagaccctttcccctggatctgcccctccagaaacctccacttaggtccaggtcccaaggtggatggtaagaggcggctgtccctgccacacttgatgggtgagtgtgtgaacggggctgggagcaggacacttgtcacttctgtggacagattccagaggctcatgaatctgctgctggggaaggtgcctgatctagcctgaccctccacccccacctcccccttcccgccccccttcaccagccctgttcccagagcttcacttccccaaaggcaggcgccgtttcctggacttctcagcagctaccccctaccccagacccctctcttgtaggcccctctggtctcagcgcctactcctccctgggcttctgcccctctaccgtgaggcttctgggcagaagtgtggggccccctcgctgtgtctggctctcgcggtataccaggggtcctcccaggggcccgccctgcccgctaggtttccagggagcttttcaagttcttagatgggcttgatggagtttcccaatgcgttgtctcagagcaggaggggccccggctgagtccgagagtcccctcagtcacaccctgggctgtttggggcagccaggcagcccgtcttctggaggtgctgcctctctctggttaccccttctggaatcttctgcgtccagttgcggcccctcctacacagcacacccaccacccccttttacctgtgactcttctttgtcaacctcttcatgtctttgagaatggagaccaggtcctcctcaccctggagttcagcagaacctaaaccaggcagatccgtgtaggttcacgtgggggctctgtggccactgtggctctgccgtcacctccagcccagcttggcgcgctttggatcatgtcattcagtgccggtcctccaaacctctcccctggctctgcaggtctgggaagcagctggctcctgggtgcagctgtgaccggagcctgaactctgctccctggggtcaccgtcccctgtaattaggctgcagctcatattggctcgggcagaggccatcggctgcccgccttggggccacaacacagagagccccgtgattaatggaggctccacctgggccaagtggcccctggtgttaggcgcttttttttttttttttttttttttgcattttttaagtgcttgtaacatttcccctaatggacaatgagacgaggagggagggaggggtggcttctctgcccaggcagatcaggaatggtcaccgcctgtgtgtgcagtgacaggtctgggaacagacaagggagagcttgtccgggaggctggaccctcacaccgatgctgcctgtgcctggcagctctgtcccgggcctcagaacagacactgaccaacacgctcctcagggtctccaggtccgggtcctggtccccggcagagcttcccatccatgggaagaagcaccgagcagccttgctggctcctcgcagggagctgggatgcatttctaagagcagcatgcgtgaagcccggggtctgggcaaaggagtgtttggggaagagtctgctgttgttggagggtcggaagtagaggggaaggaggggcacgcggtaggctgaggaggtggctggcgaccctgtggtggggacgagggggctatgagcagaccaggagccagcatcacgtttctctgtctccagaatcgaggacggagagctgccagagaggccctggcggggtgtctggggccacctaaagggcgtgggtggattaaagctgaggaaagcctcattttgggggactccgtacttaacctttgaggccctcagagctgcagcctgtggtttttcgaagtcaatcacctcccagggcctcgctcctgccttcagcgacagccatttatcagggagtctttgacccaaggagacctgaaaggtcatctggtccctctcctacccccaggcaggccacacctagaccctcccacacagatccgtcccacccttctgctgccttccaccagggacggagggtgggcggccctcccacccaggccctggcggccccaccccagccaggaaattcttcctctttatctgcctcacatctcttcccctgcggcttccgcccatttcccctcaatctgctcctagtggagcagccagcagctggtttagaacccgggggtggggggagcgctagaccagtgcagcacatctgagagtgtgccagaggtgctcccattcccatagctgatttagtaaagaaaagaggaagtccagcaacttagcgccactttaaagtccgcctggaatgaccctgtggctgccggaaccaggggcacgcggtagatgacgggagcaggcacagagaggccttcgtcccggatcagtcgctgttgccctcttggaggctgggctgcctttcaagaagaggacccaaggccctgtgagcggtggcctcctctggagcctttactgtggtcctggttctgctctgcgtaaagagagatggcttgaagcagaagctgctacgtggctgtcccaggcaggcgcccgtagtcccagctactcgggaggcggaggcaggagaatggcatgaacccgggaggcggagcttgcagtgagcagagatggcaccactgcaccgcagcctgggcgacagagcaagactccgtcttaaaaaaaaaaaaaaaaaaaaggagtagagaaatctttcccagaaggcctgcagtcacctccccttcatgtttcagaggtaaaaaaaaaaaaaactgcacatttcgctttttttttttttttttgagacggagtctcgctctgtcgcccaggctggagtgcagtggcgcgatctcggctcgctgcaagctccgcctcccgggttcacgccattctcctgcctcagcctcccgagtagctgggactacaggcgcccgccaccacgcccggctaattttttgtgtttttagtagagacggggtttcactgtgttagccaggatggtctcgatctcctgacctcgtgatctgcccgcctctgcctcccaaagtgctgggattacaggcgtgagccgccgcgcccggccacacgtttctgttcttgaacaggtggctccctgaccctgggtgtggttactccaagaccttgctctggtggggcacaattctggccccaggtagggcgaccgtataacttactgtcccttgggggacacgttagtgaaagggacccttgaatgactacggtgggacaacagatgtgagctgggtttgtcccaggaaggctggatgtatgggcctcttgagccagaggagacaacagcagaaagctctgcggctgatgggaccgagcaggagaagggccggcggaggctggggcaacaacgcacttgcccactgtgaagggcctgtgtgagctgatggctgatgagagggcagtggggcgaggctgcctcctgccaggctagaccagctccaggacacccatatctccttttcagaaccggtgactcagtggctagaaggggcttcagaattgacgggacactgagggagtcgaatggaatggctggagtggccacagcaggctctaggcctcctcccgtttcttttctgtgttctgttcctggggtctatatcctggggttgctgtaacagagtgccacaacctgggggcttacaaacatagcttccggcggctcctggagattcctggcgttccttggcctgcagacgcatcaccatcatctctgatctctggcccctgtctccacgtggctttctccccctgtctgtgtgtctttctccttttctgtcttttataaagatgctcaccattggatttagggcccactaaattcagaatgatctcaccttgagacccttaccttaattacatctgcaaagatccgttttccaaatgtgatcatgttcgcaggttccaggagttaggacttaagacatatcgttttgggggacactgttgaacccactacatttaataaacccagagttggtgccaatgtcccctgcggacaccatagcagattctggaggttccttgtaaaggaatccgtaggacttcttttcccttctggagggatgagactgtagctgggctggggaaagctgctggttcaagctggggctggttcagctggtgctggcttgccaggttgttagagagctttatccagggagaaattaacatcacaaagttgggggataagagaaggtttggaatcccaagggctggctgttgaggtcagctgcccacccctttgtgttccatcttacagggacccaggcctgccagtgctccgtttctggaaggaatgctgtgggctgctgtgccccataggcagggtggagggtccccttgcagccagcgagctgctcttcctgtagcgtgcagagggaaggaggaggcttgtttatttctcttggcctcagccgaaaatccaaccacaggctctggcactaggcagacctgctcattctcacatcatcattgcagagtgagccaggcctcttgggtggggctgtgatgagcaggaaggacctccggagtgcctgggacttcttgggcccagggttgccagaggcagagagaaagaagcctcctcctaacacttgagcaaagatagtcatcagaatccatcagagtggcctcctgtggctcttccctgggtgctgacccccctggtgcatttgaagttttcagggatactattgacgctccctgcacctccatccaggggttagtggaaatggttcttttcctccttgtccagaggtactgtggatgatgaccccaggtcccagacctcagtcattgggccacgtgtgcagataagcctgggcagtcagtaacctttggccaccaagctggcctcctgcggactgggccggcactggaggcgggtcttagctgctagcactgtggcccagccaggcctggccttgggaaggcagagggggaggggactgggaaagggattgagctgggggtggggtggtaccctggttcttccctcccagacctttggcaggtttgaactatctggctgcggctctctaaggagggagcgcctcctccgccttgatgtggactttgccttctgttcacgttgtccctgtccctaaacaaatgtggctctctgtggggagcctgggggccgccctccactgacactgctgtttcctggcttccctttgcaggctccgctcagcttcactgcgcctatttttaagcctttccttttggacggttttgcttcctgagaacacacccctccccatcaccccaactgtgtcctcctccctatccggagcctgctccacctgccccaggagccacctccctcctccaccaagcagcccaggccaattctggagggctaatttgtgtccctccagaagcaggtcctgagacagggatttcagtgggaggggacaccaggggatgcctgagtgtgggaatgggccaggcagggaatccagccaataaagggtgcctcaccagctcattgtgaccacaggtggctgcccagcccccataccgggcagcatggggagactgcagaccgtgcccccagccttgtcccacctggggttgggtaagggagctggggtttttatacttcagttcttggccaaggactgcactgctcactccttccagccttccgagggcttgggcactaggaaaggctctgggtggagacacggaaataggccatgtgaagtcagtgggcgtgattggtagcagtaaggccaggacagccttggtcaccagcaaggtgaccacacatttcagcatgcacagcccccacagacacacacccaggagatggtaattacaccagcaacagtcacccctgccgcgtgccatgcctgcacccagggaatcttattttttatttatttatttatttttatttgagatggagttgcgctcttgttgcccaggatagagtgcaatggcacaatctcggctcaccacaacctccgcctcctgggttcaagctattctgcctcagcctcccgagtagctgggattacaggcatgcaccaccacgcctgactatttttgtatttttagtagagatggggtttctccattttggtcaggctggtctcgaactcctgacctcaggtgatccacccacctcagcctcccaaagtgttaggattacaggcatgagccaccgcgcctggcctcaggggcaccttattaccccatcacctcctacagcaggtgacactgaggacactgaggctcagagtagactgtggttatgtcactctcctgtttggttctcctgctctcagccctgaaataaagagcacggtccctgtgcaggcccatacgtcctgtctccagccctggagcagtccttaagctccttgaaggcacaccaggcctttgggcctcgtcccccaagtcctggataaataggaggtgaaggagcctttgcaactggaccccactctgccagcgccaaggccctgcctgactacccaccccaccctacacagatcagggacctgtgccaaggtccagtgtcacaggagagtgaagacaaggaggtgcccatggcgtacatgctgctggactcactctgtagatcctaagggttatggggagttatctgccaggtgaggttttcccgtggctttttcctgcaggctcagggtagcatacagggaggtgcttccctactccttggcaccatctgtccggcttccctgagccctgaccctggctcctagatagccagtgtttcttcagggacagaacctgctttgctgctgctcagaggagacccagtttgaccagggctagcgttcctggaacctgagcctggaattccaccctgccctgggcagaggccacgttgctccctcctacgagagctgagctgcgcatgagattattctgaccttgggctctaccatttctttgcatgacatttgtcccaggctggagcagggctctgtggctcgcttggtgttccctccccagactgaggcctgatatgtacaccaggaagtgcttgatctggtttcaggagctgggagcggtttgccaggcagcctgtggtcagagcaggggccttaacaatggtcccttgtgcggcacattcctctctaaataggcccaggtccaggctgctcctgtttcgaccccgccatgggcctggaggggaaagtttgcatctggagggtggcccactgtggcctctttttgtgtagcagctgagaccgtaggtgcttgagaataggagaagccctgtgcccatcctgggctgtgagatgtttttccagaggtggggatggggatgggccagcatgcagttacccacaccctccagcttgttggcatcaaggtctgtgtatgtgtgtgtttttttttttttaattttgtttttccaacatggagtcttgccatttgcccaggctggtctcggactcctggctcaagcgatcctctagcctcaggttcccaaagtgctgggattataggtgtgagccaccatgcccagccagtaccaaggtgtgttttttaagagcaatattggccgggtgcagtggctcacgcctgtaatcgcagcactttgggaggccgaggcaggcggatcatgaggtcagcagattgagaccatcctggctaacacggtgaaatcgtgtctctactaaaaatacaaaaaaattagccagacgtggtggccgggcacctgtagtcccagctactcgggaggctgaggcaggagaatggcgtgaacctgggaggtggagcttgcggtgagccgagattgcgccactgcactccagtctgggcgacagagcgagactgtctcaaaaaaaaaaaaaaaaaagaacaatatcgatggttttattccctgaacatgctaagtgatccccatgtagtataagcatctcagaaggcaggaaaatgtaatgaacaacacccaccgccattcattccatccagagatcgttattttctgcccgggtgtgagtgtgtgtgtgcgtgcaaactgcacatgtgtgtatgaaatggaattaggatctttgtatacatcttgtgtcctgctatttttacttaatattctcggcatttctcatcttcaaaaatgtgattttaatgatggtgcaggcctttgacatatgggtttagaaaatctgcggaaacccggactgtttccaggttttgtcagtttaatgctgatgcaaatgtcctcgtacgtaaatctttctgtacttctgattatttccttgggataaattcccagaagtgggccaaagcacatgaacggtcttcaggcttttggagcaagttgagatcggtggggattggagaagggacccagggaggcttttgggagcttgcgagattggagtctggctttaggggacttgaattcacagatgaaggagatggctggcaaaggtgggaacctcctgctctatgggtgggggggtgacactgctttaccttccagtgacagcatggggatcctcccaacatgacctggctccgcatctttctgacactgtgcacggtccacagttgtgatgctcagctgggagcctcttctgtgtccttcagttgcattaactccttgcagacagaggaggaagctgtccggtgctcctccctgctgcgtgggtcctttgaatctgcccagttgggcctgtggatctgtgcagtcacgtacggggttctaaaatctgcaaaatgacaagctcacgaacactctcgcttctgtgggtgaatgtggataccccttggctgcgtctccctccacagggaagatggagacgtgtaaagtgacaaggacctgctacccctgggcaggttatgccggttccactgtgaggatggtggcagggggcttcccaggaggcctgcacattgggaagagaggggcgaccgtgtgtgactgcaggacccagggcgcagtcttaggactctgatgggggaggagatgctggggagccctgttctgccagcctggtgacagacatctcctaatgtttcccggctgggtacaactcacaatgtcctccgtggggaggcaattgcccatgaggcatccctggcagggatgatcttgtttcattgccacatatcccagcaatgaaacaagaatctagagtgatgtgattcctccgatgacttctccaaccatctggggtttttgtgcgactccaagaagggggaaggaggcagctctcgctcctctgggctcctgatgtggcagctctggaatggccacgtgtccgttggcccacagtgggccatttgtcgaatgtggttgtggtgggattggggctgggctggagagtgggtgaccacaccagctagcctcaccctgggccactgtgcagccaggggtttcatcttcccaggggtctcgttgtgagtgtcctggggctgctggaacaaattactggaaaccaagtggcccaacaaagattgattcgctcatggttctggaggccacaagtttgacatcaaggtattggcaggaccacactccctccgacagctcgaggggaggacccttccttgcctcctccagcttgcgttggcccaggcgctccttggctctggcagcatctgcagtctctgctctcatcacgtagccctccccaccgtgtctctttgtgtcccaagtccccttctgcctttctcctataaggacaccgagcactggatttagagcccatcccaaatccaggatagtctcatcccgggatccctaatcacatctgcaaagaccctttttccaaataaggtcacattcgtgggttcttggggttaggtattagacatgtctttttgggggtcactagtcaaccctctacagaacctcagacgaaagtgaatcttcacaggctgaaatgggggtgaaggtctagtgcgtccctcctccttgggagctccctcagggcttgtgcctatcctgtgatcctgtgatccagccttttttttgagatgaagtcttgctttgtcgcccaggctggagtactgtggcacgatctgggctcactgcaacctctgcctcccgaatttaagtgattcttctgcctcagccttccaagtagctgggattacaggcgcccacccccatgcctagctaattttttgtgtttttagtagagacagggttttaccatgttggccaggctggtttcgaactcctgacctcaggtgatccgcctgccttgggcctgccttggcctcccaaagtgctgggattacaggcatgagccaccacgcctggcatttagtaggttttggttgttttttttttttgagacagagtctcactctgtcatccaggctggagtgtagtggtgtgatcatggctcactgcagccttgatctcctggcctcaagtgatcctctcacctcagcctctcgagtagctgggattacaggcatatgccaccacccctggccaatttttgtattgtttagtggagtcggggctttgccatgttgcccaggtttgtcttgaactcctgggctcaagcgatctgtccaccttggcttcccaaagtgttggggttacaggcgtgagccaccacgcctggcttagtaggttttctagaagcgcctgaggcctggtgaaggcatggtgtcatggagtagagaacattcaactctgttcccggggagccggaacacacccctcgtagccaatctcaacagtcatgacgtggccaggatgacatggggagggggtggtgtggactgtgtgggaggccagctccccgggaagggggctggagtgggcttggctttgaggaggattcccaagaggaggaggaggcggtggcatgctcgtttggggggatggcgtgagccagggtgggcacctcttcatttaggtgtcaccttcttgacattccagccgggacatggtttccttggggaagatggacacccccagagtggggcatctcctggggaagatggacacctccggaatggggcgcctcctgttctcactgttcttctagcacacagttgtattctcttgcagttctggaggctgtgagatctcctggctgttatctagaacaaactcgcctttgagcagcgccgtcctgatggtggggtggcccctgcgggtggaacagcccctgctgtctcagagcttactgagagctagtgggcatgggagtggtgctggaccgaaacacccagagggatcatagagccaggcagtaagcacagaggccagctagtggggagggagggacccatccatgaaaagacaccaagcattgaaagagaggagaggatggttggggaccggcacacatgtgcattttgcgcagatggccaaggtggtgaggcgccagccacgcagacaactggaggaaggaggagtgccctaggggaggggccagctccggttctagaatgatccgcttgtgcacgtgggcctggctggaataaatcattgcatccgcaccgtagactcaatcgtaagctcacaccagggcagcctctgctttggtgcagtgtcttcgatcatgagttggccatggtgggggtgactccaaggggactcccaaggagggggttcaccggatctcccagggaaggtcatttgttttcttgggttggacctgggacaaggccttctcctgtctagtttctgttctccaacttgaccgcacggaaggatgctgaggacacctggaagccggcccctgctctacagcacccataggacagaggcacaccatgtggggacagtttggacagtgctcaggaggcagggagcagatcagaggaccgcgggaggccctgggaaccgcacgaggacccaggcattgagctctgcactttctggcatcagcccgatgtacagtctggctctgtgtctaccccgtacttcactttccccatctgtacgggggcggtaataatattctttacagcccaggtttaagcgggtgtagatgtgatgagcttggtaagcccatctcattacattcagttctgggcattgaaccctggactttctggctggtagaagtggacattcaacctttccttggggccctggggcttctgcagaatcagaacacagccagcagtttgcatgcagggtgcagagggacagagggacaccatgtcgggagcccacacctggcacacccctgactctggggctcagtgtcctgctgccctgcggccacgtgatcagctagaggtcatggctggacccataggcgaatacagcctgtggatttgattttgtttggccctgcggtgttttattttatttttagttttagtttgtggagacagagtctcgctctgtcagtcaggctgagtgcagtgacacgatctcagctctgcaacctctgcctcccgggttcaagcgattctcctgcctcagcctcctgagtagctgggactataggcgagtgtcaccatgcccagctaattttttatttttagtaaagatggggtttcaccacatcagccaggctgctcagtgttttaaaaagggcttgttttgctttgtgccagcatttaaagatcaggagatatcatataaagatccagatttctactctcttgagaagtgaacagctctggccacgccgggcccatatcctctagggcagtgacggagctgagacagggcctgtgacaactgagagttctctggagtccacacggctccttgcccagcttctggtggaggttgagcttagtgacccaggatttcgtctgtgtccaccaagaaggagaggtgcctgtggcttagagagggcgcccacaggagtgccttgcccaggaagctggcagctgaggcggccagggttagggggttgggcttcctcttcccctccccagtgcctgagtgcatttggaggaagagagacgggtgaggggaaggcactgaaattggtcctggagcgctattattgggggctggggaccagctgtcatcccttttcctgtgggcaggggaggcagtggtgggatcccatgagacccggactctgtggcctggtgaggcagggagcggctggggagacactgtgggtctccacaggggtgcgctgtgggtctggcctggggaaggagctggtgaatgtgcctgccatgtgggtccctccctgctctggccctgataaccaggagcggctggctctcatttggagtgcggttgtggggactgtggaggtggcagcttcccaggtaccatccccactgcctccgagggagcagaccctggtggagaggcaggatggctgcagggcgggagctggtggttggcatcactgcacgggcttgtagtagtggatgggaagatgcaggagaggctgatgactgagaaagttggttcctgtggactaagctgggggagccggacaaccaagtggttagaaccttgggctctggtatcagcctgatgtacagtctggctctgtgtctaccccgtgccccactttccccatctgtactgggggtactggtattctttacatcccagggttaagcggctgcagatgtgatgagctcggtaggcccggcgcctcgccggcactgaaagctccagtgtccgcccttagtgtcattgatggggttttgttcctgctgcggttctgattggttacagttgcggtcacttattattggaggcatgtcccccgctgtggctgatggtagaggtgtgtttgctggtggtgtcccagtgtgtgccttggctggaggtgaggagggataaaaacagccgcgacaagaaggaaatcaaggccgggcacggtggcgcacgcctgtaatcccagcactttgggaggccgaggcgggtggatcgcttgaggtcaggagtccgagaccagactgaccaacatggtgaaaccccatctctactaaaaatacaaaaattagccaggcatggtggcccgtgcctataatcccagctactggggaggctgaggtaggagaatcgcttgaacccgggaggtgccgctgcactccagccagggcaacagagcaagactccatctcaaaaaaaaaaagaaggaaataaaagtcttctctggaactagaacgttcctatgtagacgtagctggagggggaggctgtgtggtttgcgccgtggccatggcaagacacgacgggcagcatcttcccactccagcctgcatctctgccccagaactcatgatggttctcctaggatggggctgtcccttccgcttgctgagacatgaaggacgggaagagacccccggccctcaccgccgcatcgcctgccttcctctgctgctccttagcaggaaacatgccggagtgttccctagccatccattcaccaattgcatcccctctctttatttttcagccttgaaaagatcttttgaggtcgaggaggtcgagacacccaactccaccccaccccggagggtccagactcccctactccgagccactgtggccagctccacccagaaattccaggacctgggcgtgaagaactcagaaccctcggcccgccatgtggactccctaagccaacgctcccccaaggcgtccctgcggagggtggagctctcgggccccaaggcggccgagccggtgtcccggcgcactgagctgtccattgacatctcgtccaagcaggtggagaacgccggggccatcggcccgtcccggttcgggctcaagagggccgaggtgttgggccacaagacgccagaaccggcccctcggaggacggagatcaccatcgtcaaaccccaggagtcagcccaccggaggatggagccccctgcctccaaggtccccgaggtgcccactgcccctgccaccgacgcagcccccaagagggtggagatccagatgcccaagcctgctgaggcgcccaccgcccccagcccagcccagaccttggagaattcagagcctgcccctgtgtctcagctgcagagcaggctggagcccaagccccagccccctgtggctgaggctacaccccggagccaggagggtgagtcgcagagcgctaggtcttggatgctgtggtaatggggggcctggttgctggctttgccacagaatcttggaggaagaagctggatatggggtggagggtgctaccctggagacccagaaagaccggaatgcatgggggtgggggtctgcaagctcaggagaggtggctctctctgtctgatgggaacatgccaagatgccccaagcgggacttgaatgagagtttggaaagattttctgggtttcaaggagcctcctttatgggtcaccgtgggccttgctgggacctctgtctgctgtgtgtccctggagggcctgggaggcttagagaatgaggagccacgcaggaaccagggcaggctcatgcaggggtgtaggacagggtggagttgagacccctagaagggctgtcacattctggtggctcctgcttgaggaattgcaggctgcctggatatgcccagcagaggccgagggcttggggaagggaggagggacgtatgcctcctgaggcttgcattggagcccatggtctggtcctcctcccccaggagggatggttgtggcagagggaggggaacatgaggagcaccttagcctgcaggacaaaattctcagggcactgggaaggggtgcctggaccagggggctgtgtgatagctgcacacggttttatttgggggtgcccttctggcgagaggagagaggccatggggctccagcagcgtcctgggagggctcaagcccacagccgtgctgacatggagcttacaggcaggggattggtgccagtcctgtgggacacagggcctgtttggaaatgccaggctgtgggacatggttgggtcccttctcagaagcgtgccccctggccccagcagggatcgtggctccatggggctatagtaaggtgccagctgggttagaagcccctcaagagccaggtctgattctgggcacaggatcagaactcagtaatgctcagtaagccttctttaggttggacaaacagcacagtctgggtttttgatttagctgctgcttcttatttctaaccgtggtgaaatacacaacatacaatgtgcaattttagccactttgcagtgtacgtttcagcggcattcagtacattcacggtgttgcgcagctgccaccgctgtccatctccggtacccttttcatcctcccaaactgagctccgtccccgttagaccaagctccccatgcccctcccccagctgctggcagccaccattctattttctgtctttattatgaatttatttgaccactctaggaaccttgtgtgtgtggaaaaatacaataactgcccattttgtgtctggctcatttcactcagcatgacgtcctaaaggttcatccgtcgtgctgtagcatggggcagaatttccttcctttcagaggctgaataatattctgttgtgcgatgcacttgtgttgtgtagctgttcctccatcggtggacccttgggttgcttccacatctctctaagtccctctttccatcttctttgacttttctttgacttttttgagacagggtcttgctctgtcctccaggctggcgtgcagtggtgtgatcactgcttactgcaacctctgccccctgggctcaagtgattccccagcctcagcctcccaagtacctaggaccacaggttgcgcgccaccatgcctggctaatttttaaattttttttgtagagacaggttctcactaggttgcccaggctggtctcaaactcctgggttcaaatgagcctcctgcctcggcctcccaaagtgttgggattataggcatgagccacccaacccctttttggtttttctttttgaatgagagttctccagtggtcagtgggcttgggggctgggaggatgtggggcctggagagggtgtgggtttggggggagaccagtgctcctcatgctttcatgggcatgtggagtgcacatttgtcttggcgggtctggggcctgggactctgcatttcctacagagggggcatcggaacacactgagtagccagaggctagtgggccttggaaggtcctttccggccctcagtgtgcgagtcccgtgttccctctcccatctctctaagcttgactctgaagagccaccctgccccagccacccagactcagtgacagtggttgctggtggcatggtgtcaggccaaaggcatgggcagtttgcagagtggcaggaggctgtttcctcccctgccttctgttggtgcaggacctttgtttgacgtgccggatacacccccatcctgggttgatgtgttcacactcagctgagtcaaacaggatgtggctggggaggcggttgtcaccgagccatctaaatctcggtgatggctggtgctggatgcacagggacgtggtcctggctctgggggacaggtagggggatgtccatggggatgtacaagaacattctcctccaggggcagacacagtttagcccctaaattgtgccagagactgtgccgggagccaggcccagggacacaacctgcgggctctgctttctggagctcaccgagccgtgagcaggatggctgggacacaaggagtgtccagggagcttccccagcagtggaagtacaatttcatcaggccaggaaggggagagaaaggcaggccacgtggaggcagcagcgttcagagctgccaggaacctggcgctctggggggacggtggctttctccatggaataggatgtacacgttggagccggggcatgggagaaaaccatcagcatcccagacccggccacccacggacagggacctgtgcaggtgggagtccagctcacgtggagaggtccgtgggctgggctgacagtcctgagggcctaagcaagtccaggtggaggaaatgcagggacagacgagggcagggccttcccaatggaggagtgctcttgaaatccgatgggagtggcttctcggggggcccaggcctgagccccactagttcttcctccgaggcaccacctgcttgcttctccgtcctccctctctgtgtcacgaccgttctggacacggatccagttctctccaactcagcttcctgcccatctttccttcaggcccatccccttctgcccctccatgtggggctgggctgggagttccctgagccccgacatgcacagctctgaccaatctctgcggcccctctgtcccccgagcaccagggatccagctggcaccatggggaaaggaatcatggagggagttccgtgccctctgagcagacgcccagccccttggcttctgcctgcgggagggcatctgtgctgtggtttgtctccaccccagagctgtgggtgcagggcagggtctcctggggccccagctgaattgctcccagactgacttccccaaagcacagcactgctgagatctcttcccgtgctgagccttctctgctcactcaccataggcccctccacggttgattcactctcctgctcagctcacacctctctccttcccagcttctcctgctttggtcttcccttggtctctcacacctttcctcacaacccctttgccctgacctcctgaaccctgacctctgcttctctttacatcactgccttggtgaactcctatgcatccctcaaaacctggtccaaatacctcgtgtttggcttgggatataaatgatttgtgtataaactttctttcctctgctagacttttttttttaaatgtgaaagtagtttttcagatcataaaaagtaatcgagtaccctttctttaaaatgcaggaagtacagaaatgagaaagaacctaaaattcacctgtaagccagcgatatccatgcttgaggttttgctgtatagtcttcaaaattcctttcatgcccccactagattctgagggtagggctgttgtctttgtttttttttgtgttttttttttgttttttgttttttgagatggagtctctctctatcacccaggctggagtgcagtggcatgatctcagcttactgcaacctctgcctcccaggttcaagcgattcttctgcctcagcctcccgagtagctgggactataggcgtgggctaccacgcctggctaacttttgtatttttagtagagacggggtttcaccatataggccaggctggtctcgaactcctgacctcgtgacccacccacctcagcttccctgacctcccaaagtgctgggatcatgccaccgtgcccagcctgtcttggtttttataaagaatcccataaggggccaggtgcagtggctcatgcctgtaaatccagcactttggaggccgaagcaggcagattgcttgagcccaggagtttgggactagcctgggcaacatagagaaaccctatctttacaaaaaatacaaaaaattagccaggcatgatagcatgcgcttgtagtcccagctactggggaggttgaggtgggaggaccacctaagcatgggaggttgaggctgcggtgagctgagattgtgccactgcactccagcctaggagacagagtgagaccctgtctcaaaaaaaaaaaaaaaaaaaaaaaaaatcccataagataccaagtaagtgacttggacataataggtgtgccatgaaattatgctgaaggagtgagccactggtggtgagttgggatggcttttttgtggttcttgtaggcagatgtagtgacccccatgggtcgtccctagagaccaagcagaaactttcctggtcaactttacccccaggacacctggtctctcctctggaggttgtgctggagggctcagtgggtgggtgttggcttcagtgtgggggttctggaaggagtcagcatttcaggagggagtgtgggcacctagatggttgaaggggagggagaggaagagaggcgctgcagagggcagaggcatccctgcctgctcctccgccccagggcctggtgaggtctgagctttatgctggtggggtggattctcggtttccgaggctctggccctgcccctggacttggcaccctccttgctgtcctcccacagaagggcgctcatcctttggggtcatccctggtcctctcaggctctgggtggggacggccttgcctcctctcctggatccctgctcttttcctgccccccaacatgggtgcctctgggtggagtggggtggggctgggctgcagcacccagtactgagcctgcaagggctggctgctggctcagagccccccccaccagagttacccccctccggctcctcagccacaccagccaagtttctccagagctgccttataaggcgggtgctcagcgctcgttcatgggtctggttctctgccttcttgggatgctcactgggggcaagagggaggccaggcccagtgcccagctcagttctgggcatgtcccagctctgccccatgagtcaactggttctgaactatcattccacccctcccagcctcaatttcttgatctgtcaaagaggcatctgcagaggtggctgggggctgagctctcatgtatccacccaccccaagaaccaagaagggagtccacagtggttctggggccacttgtgaacatggatgtgaaattggggcggggtagacatggcagcatgtctcagtagttttcctgtgacccagagggtctggaaatctttgtcatgtgggtggagcgttgagggagcagggggtcaggcccccccgagctgatgatggtgggcgtggctcttcgcatacttggtccgcaccgggccgtgtgttccaggggcagaacagggaggaatctcagcacagacagcagggctgccagtacagcgttgagtatagggttaatcaaagcacagggctccctggaaccacccaacacagagcagtgaagaggtggctttggggaaagtggggtcagagctgagcctgagtggggggtggggagggcgggcatcagcctgcaagggagggacacctactgggccccagaagttcctggtggggatcagggactgtgaagttggggagagggtgaccactgtgatttagggaggaagggccccatagacagcccagcttctggccccgtgtttacaggacaccccacataggctctgagcctatccctggactgtggactccctgaggcagggtgtgcaggttcgtccagtaccaggtgtaaggcagggggccttggtaagcgtcgagggactcactggtgtctgatgaagcagtgagtttggatcgtgtcatgcctcgggtcctgagcctgcaggatttttctgtggggctgtgtgcttctgcttctggaggtgtccagaaggcactgacgttcctgccgggatgccttactcggaaggtcccgctgctcccacctcctcccattttcctgagctgcttgcagagggcacccaggtccccttttactttgggattgggtctctttctctttccccttctaagaacaagtaccctccttctccgaactgtccctggagcctctcagacctaggtctagagtgggaagtcccgcatgtgctgggggaacaggaatcaatgcgggaggattggccaggcccggtgtgtctccttcgtggtgggacggggtggggccagagaacagagcctggctccagagcccaggaagagaacccctcccctcgccggcctgccaagcaccgtgcagtggtgagaggaaaggagggctggtccgggaatgcagcgggtgccgagcagctgtggaataccttaaatagagcgcagctgcggggaagggtggggccaggaggcaggcgctgggggcggtttctctgctccgccccctgcagctctgtggccctgaccacccagcctggccccaggatggagccccggcccccagacacatggcactgggtgaggccgcctctcagcacttgtcccaggaagtcagagcagctgccagaagagagaggagctgtgtctgtacccgccgcctcccaggcccgggacagctgccgggattgagggtctgcacaatggcgagcctgtccggaggggcgcgccgcggccagacagccatgctctgtgcggtgtggacagagggcacattcagccctggaggagcgcactcagactccccgcctcggggcccaaagtgtgggcagcccctaaccagaccctggattccagcagacagcctgggaggatgccatgtggtccaccctgacacactgtctcacctgtgacctcatttctgagagctgcagggaggcgcttcctcagttggactccacttcctctccggggttttctgtgggtgttataagtgactctgtctccttcagtccaaggggggctcctggggtatgggctgtaactgacaggctagagtagcccatggccagggctgagcttccttcccgttctctctgaacactgggcccaggaaggggttaaagtggagatgctctgattaaagttgagggaggcatggagctcccctgaccctgtccccccatcccactgctgctactgggtgtactctgtggagccccaggactcttaaagaacccagagtggagattcccggtctcatccagtgcaggtgagggggaaagtgatttgtccacagttacatggctaccatcagcacacctgggtcaagctcgattccactccacggcccctgtctgaaacctggaactggaaatggccctggaaatcactgattccatctgccgccttccaaaatggcccgcagaggttaagatatagactcctgtaatgccttgcccactcgtgtgtggggaaatggcagaggagcaccggctttgccctcacactgcctgggctgccgcccctgccctgcctagtggctttcctctctggtccgttttctcattgtggaagtgggcacaattcttcctgtgcagcgtggttagagtggacagtgatgattcgtgaagcagggtggagcgcctgggggattcgtgttaaacaagcacataaacaaaagccaacacaacccttacttaatcagcaagcaggccttgtctgaagcccctgggcagcacctcatgccatccctaggttccaggccggtggtgtcgccccgtgtctctctcacccgcaagctggtgtttagaagccctgctctgtgttctggctcccattctccctgtgacctttccctttcttcatcctaaaaagcaatgcacgacggggcgtggtggcgggcacctgtagtcccagctgcttgggaggctgaggcaggagaatcacttgaacccaggaggcggaggttgcagtgagctgagattgtgccagtgcagtccagcctgggcaacagaacaagactcccatctgggaaaaaaaaaaaaaagcgatgcccagtcattcttagatagaaaatgaagatcacatgaaatttggaaagaagtttttctctcccattccccaactctctcccaaggggtggccatgttgacagctgggtgtggcattctcctgaattttattcctgcagagtcattcagggcttgtgtaaaaaaagtcaatgtgtaaatatagacttttcaagaacacaaaggaaatcagacttctgctaccagcttttattttttccatttaacaacactgttgccacttgtagatgtagcacgttcctttttctttttctttttttttttttttgacagagcgtggcccaggctggagtgcagtggtgcgatctcagctcactgtggctcactgtaacctccacctttcgccttccgctttcaagcgattctcctgcctcagcctcccaagtagctgaaatcacaggtgcttgccaccacacctggctaatttttgtatttttagtagagacggggtttcaccatgttggccaggctgctcttgaactcctgaccttgagatccgcccacctcggcctcccaaagtagcacgttccttttaatggttgtgtcatcagctgtcccatggccctgccaggcttgtccagcttcccactgtgattgagaggctgcaacagatgttctcgcacttgtacatgtgcacacatgactgaaggatgagctcttagtgaatttctgtgtcaaggatgtgtgcatttaagttttgatctgctgggcacagtggctcacacctgtaatcccagcactttgggaggccaaggcgggctgatcacttgaggtcaggagttcaagaccagcctggccaacatggtgaaaccccatctctactaaaaatacaaaaattagctgggcatggtggcttgtgcctgtagtcccagttactcaggaggctaaggcaggagacttgcttgaacccagcaggcagaggttgcagtgagccaagatcgtgccattgcactccagcctgggtgacagagcgagactccctatcaaaaaaaaaaaaaaaaaaaaaaaattgatccttgttcctgaattggcctctaaagtggttactagaattttttaggacccctcccctcgtcgacctgctcagctgtctgctgggccctgtgcagtgatggtccagcagggaggtcctatgccccttacccctggctgagggccaaatgctctccaattggtgttttattttgtgcatctcggtcaagcgagagggattatctcttcgtatgttataggccagggccctgtgttctcttttcatttggaaggtgtatccttttcttgttgaaattttttaaaaagagttctttgtaagccaggcgtgatggctaacacctataatcccagcactttgggaggctgaagtgggcggattgcttgagcttaggagttcgagaccagcctaggcaacatggcaaaaccgcatctctgcaaaaattagctgggtgaggtggtgcgcctgtagtcccggctactcgggaggctgatgtgggaggatcatttgagtctgggagtttgaggctgctgtgagctgtggtcataccactgcactccagcctgggtgacagagtgagatcctgtctaaaaaaaaaaaagagttatttgtacatctttatcacagcaggtacgagtatcttgtccccagctgcctacttttgattttgtttctgggatgttcttctacacagaacattttaatcctgatattgtcaagtctctgctttcccttttagcttttggaattcacatcctgtttagaggtctcctgcgttctgaaattataggaaagaatttcacccacgttttcttctagtacttctgtggtttcatttttacatgttgaaatcatgaatccattggaatgtattttggtttcagcagcgaggtaggggtagatggtattgcttggatacacagcagcgagcttggtctggagcgggtggggcgtgtgtgtgtgtgtgtgtgtgtgtgtgtgtgtgtgctatttttatcagttttggtgtctgcattgtgctggcttagcaaaaacaatttggatgcatttcttttaccctctgccttctggaacattttaagcagcaacataataatctctctgttaaaacttttcaagaattcactcgtgaaaccatctgagcctgatacttttgggggagtctagcactttaaaaacttaaactttttccatgggtctgtgagtttgggagtttttctttcttcttaaaattcattactatttttttcctagaaaagtgtcttttagcttatttaaaatccgtcagcttattccgagggggttgctttagctcgcttagtgaggacagtgtgcagcgcggtgattgacatgattgatcagcagagcacgatcgatcagtcggtgtgcaaacatgactgactgtggccagcgtcctgggatgctccatgttgaggcacatgtgtgcagtgcagggtgatgtgtattctgagaggggatgaagccacaggacccctgcacccttaggagagagcccccctccccaaggctgcagtcttgagtaggtagtgacgggactgggtctagggggctgagtggtcccagcaggccaagggcttcaggaattatgagaagtttggagttgcccagagagcagctttcaaaaccagtctggactgcagcctccagaaagacatgcgattgacaccacgaaccaggacacacctatatatggggtgggggtggggatgggatgtattaatgaaaccaaatttccgtgatggaattcttacctttaccatgcgtgtgctacactcagtattttctttttttttttttttttcccctctctctttttttctttttgtttgtttgttttggagagagggaaggctttttttcatttttttttaaacagctttattgagatccaagtaagctactatacaatccaccaatttatttatttatttatttttttgagacggagtttcactcttgtcgcctaggctggagtgcagtggcgccatctcggctgactgcaacctccgcctcctgggttcaaccaattctcctgcctcagcctcccgagtagctgagattacagacatgtaccactacgcccggctaattttgtatttttagtagagacggggtttctccatgttgaggctggtctcgaactcctgacctcaggtgatccacccgcctcagcctcccaaagtgctgggattacaggcatgagtcaccgcgtggcccaatccacccatttaaagtgcataattccatggttttcagtctattcagagagtagtgcaaccatcgtcaccacaaccaattttagaaaattgaaaatttgagaaatttagaaaatttttttcttaagaagaaaccccgtagcctttagctatcaatcctgccctcctcctccatatttccttcctatctgtgtggattctttttttttttttttttttttttgagatagggtctcactctgtcacccaggctggggtgcaatggctcaatctctgctcactgcaacctccacctcccaggctcaagccatcctcccaccatggcctcccgagtagctgagactacaggcctgtgccaccatgcccggctaatttttgtattttttgtagagatggggtttcaccatgttgcccaggctggtcttgaactcctgggctcaaatgatcctcctgccttggcctcccaaagttctggaattacaggcgtgagctactgcgcctggccgattctagacatttcttgtacagagaattgcacgtttggcctttgtgtctggcttctccacttggtgtcatgtttccaaggtccatccacattgtggcaggtgccagtgcgtccctgagtaatattccaccatggcatggaccattccattgtggacagacatgttgccttcatcagctgagggacattgggttgctgccaccgctggtgagtgtattcttttcaaattaaaaaaaaaatgctggtcaccacccactagatcgttttcttggcccacagggtgggacaagccggcctgggtgagggccaggaggtggccaggtggaggcggctggagcggccctgggttgcctctgggcgcagcaggcagaggtgcaatggcagagtctgagcaggttccctgggcggatctccatgccggtaatgtttgtttattcaagaagtctcggccaggcgtggtgcctcacacctgtaatcccagcactttgggaagttgaggcaggcagatcacctgaggtcaggagttcgagaccagcctggccaacatggcaaaaccccgtctctactaaaaatataaaaattagctgggtgtggtggcgtgtacctgtagtcccagctactcggtaggctgaggcaggagaatctgcttgattccaggaggcagagcttgaacctaggaggtggaggttgcagtgagccaaaattgcgccactgcactccagcctgggtgacagagtgagactatgtctcaaaaaaaaaaaaaaaaagaaaaaaaaagaaatctccagtgctgccctgtgcccggcaccgaagccgagggaaggcagcattagtatgagctcccagcccaccgggctcctgtctggagctgacgtgcgaccaaggcacacgagggaagcatggcgaggtggacggtgcggaggcataaggagcaaaataaggcagatgcagtggctcagtggctcctggtggctgcgaggagcgtgggcaggacagccccaggagggcacctggagagcagggccggctggggcaaggtgtgtcaggcacttgtcaggagcaaaatgtaaggggacaccaaagagctcaggaatcaacacagatagtatttaatgcagtatttttcaatatcgaaatgatgcatagtaatctctatgatgaacaaatgttggaattttaaattaagacaggcccagccctgcacgtgcacagccctgtcagagtttgttcagcgtggaatttgatttgtttaaaatgttgcttcaaaatattgtttgattcctggattttttggcactgccttaacttttgcacctggacgaaggcctcaccctaatcccagctggagagggtcaagggctggtgaatttggctttggacctgcagagcttgtggtacctgagaggtggggccaggaacaggaaggagctggtgagaacggcacccggtatgggatggggccagatcagagcagcactgtggctctttccaacccgtggttttgctgctggatgcttggcgttggtgctgagcccccggccctctgaacggagtgtgatgaataacggggccggggagctcttgggcccctccctgaagcagcagtgaagccagggacatgccggcagcaggcagggagagggacgtctggtctgtgcctggagccagctgccccatggaggagctgggtgaggatgcggtgggaggaagaccttcccagtcctgcatcctccgaagcataactgagtgcttgtgtggcttgggggtcactctggtccgaggacagtcttgctttgcttagccaggctttgaagagccaccgggatacggacagcagccctgctgggtggcaggttgtccaccctcgcccactcaacgctggaactggatgcagagcacctggatggccagtcccagagtgtctctgacactcccagtcacctcatcccttagaccaggataagatgcgggatcccaacctcgagcctcccatgggctccattccatgtgctcccataagccactgggcccacctcctggctccagggctgtctggccatttggcatcttggtttcctcatctgtacaatgaaaataatagtcccagccttctcgaggagttacaagatgcctttcgtgtgaaaaactgggatttggtaccagactatctggatttgaattttggccctacccctcctaacctgtggctttgggccaatctggcctccctgtcctcagtttccccatttatagagccatctcattgagttgctgggaggatgaacataaggaagtgtactcatgtgcccagagcattgtgattttacttattattaccaaacgaggcacacaataagtgcctaatagatgctcagtgtcatttcacggattctgtgtgccttgtgtgtctccagcagccaagctctggaggtggggaagctgttgacgagttgcacgaggtaattagaaagaggaggccacaggtgcaagggtttgggtgacacctgtggacagagagaggccgatggaccctggcagaggggaagggggcccttgcacatagaaaatgtttcctgcatccaagatccttgtgactctggaacagaggcagcagaggtctgcaaattccaaatcataaacccagaaagcatagaacattcgtagagaggaccagaaacatcatatatcttagtgtgtatagaattttccacatagccaaacaaaagcacgtttctaactgaagctgttggagagttcctgaggactttataccagacaagggccggtaagtggaagttcaatacgcaggagccattccttttgttcacaaatgtttgccgtcttttctgtctatatccgcattcatgtgagggcactcataggtccaccgtccagccccatgctttgtttgctaccaaaaaatttcttaagaattcctcagctgcaaatcctcctaccggagggggggttccaggaacccagccttgctcggggttggggcacctcagcacctgctgcacaggcgttggtcattaaaggtcatgtgccgtatccgtgggccctcggggtctggtggcacctgggcacacagtccagtggcggcctcctacctgccagacactgggagtggggggctcctcattcctgttccctggcggtggggggagtgccccgagctgtcacacatcagaacccaccgactcacacgttgcggcaccttacagccccttgacagcctctcagcctgagagaccatcaaactgagttcctggagagggtggctgttgaggcctggacacaggtgtggacaggatagccctgcctcatctcggagtcccgctccggttcagcctcttgtgggtctgaagctcaggctgggccagtccctgcccctcagatggccggaaaggcagcccagccccacggcctccttgtcaggctctgagagccgcctggcctccagctctgctctttttttttcttaagatggagttttactctgttgcccaggctggagtgcagtggtgccatcttggctcactgcaatctccacctcctgggttcaagcaattctcctgcctcagcctcctgagtagctgggactacaggcgcgtgtcaccatggcaggctagtttttgtatttttagcagggaccggttttcaccatgttggccaggctggtcttgaactcctgacctcaagtgatctgcccacctcggcttcccaaagtgctgggattacaggtgtgagccgccacgcccagcctccagctctgccttgattttctcttaaggccgtgaggatgtccacgcctcctcctttcctcacggcccattgatgtctccagatgctctgcaaagccaccctcccctcgggagctccccagctggtgacgggggaccttttggggatcactgcccaggtagtcatgtaggtctgtgggccgtgcttccaggctggaccgagacccggtgcatggggtgcttctggtctgagctgaggcccctggaagccacagccaggaggcagcaagggacggctgtcatgtcccctctcccctgtctcccagggtccctgcgggacagatttccctgcctgagcctcctggttgcccataccctggcctcccaaagcccagcctgaagccttaggcaccctacaacctgcttcctctagcagcctgccctgtctcttctctgccgatgttcctgaaactttcctgcctctccttacctcttggccagagagagactggagaccctgtgggaacccccgaggggagggagaaggccgctgtttgaacggaggtggtctttccctctgcccctccccaggcgggtcacacttgcaggcccagcctcctgctgtggcagcgcttggggtgtcggctgcctcctgggcacgagttgggagctgagggaggcgctttcaggaccggagtggcaacccagctggaggaggagtaacaggcccgtggtcagcagcagccgccgcagggaccccggcgctgtacctgtgccccagctgacccctcccgcttccctagggtgggccggggatggtggtctgttgcccagcccaggaagaagaggggccgtaatcagcagcagccacctcaggggaccccagcgctgtacctgcgacccagctgacccctcccccttccccagggctggctgggaatggtggtctgttgcccagcctaggaggaagaggggctgtggcttccactctagaggtctctctcccggtccctcccccggtgctggtctaactgcaggcctgccttaggccgtgccggcacctgctgactgacgcttagcggatgctgataggagagggctgggatggggaagcagcaagtcccggtcactgtgggctcgggttacagatggttgaggcacctcctggccatccccaggaagcaaggccccacgcagcctccgactcacccactgcccgtgtgtatttcaggaggctgcatcccccaaggcccccaccaggtaacttcattgggctgggtgtcgctgcaaaaccacccattgggtgcggtggtcttctggtggggggcatggctggggaggatgcggtggaggagaagccagctccgtggttggggggagggcggactatccgtttcctgtctgtcccctgaactggagctcatggtccctcccccaggtgcctgggccatggaagaggtcacagccctgccttattcctgtggcagcctaggggagccctggccagtcccgtgtctcctgggagggcgacagcctggtcaggctgcagggcaggactggaatgcagacccctgcttggccatgctgttgcctggctgctctgtctggggaccttctgttcaggaagagagaagcgggccggacagcccggctcagtgattggaagctcagctccccatgttcagtccagcaggaagtttgcctcctcggaacacttgcgtgcttctgcatgtgtcttcttggctggtggttctgcgaggcccctactgggctgcgtcatgtcctctggccaccctggccttggtgcctggcccctgtgaaacagagatacctgggcagtcccccacttgtgcttgcaagcctgtgtggcttcagtgatggctgattctgctccacccagaggacctgggaatcctcagcccaactgtccagaggagtctttctcagtggggagagcctgagctgtcctcctggtggacagtcctttagatctcaggcggacttccctgccggccgttcctcctgctgcccctgctcctctgtcccccatctgtctcccaccctctcccctgcagcagccagctggcacggggacctccccttccctctgggattgtgaatgagacgactttcctggtccttctgggtctagatctttctggcaacagtcagtgaaacccttgtctcaggtgggaggagaaggctcagtatgtggtcacaacaacggtcctaaccacatcactctcaaacgctggctttcacttaccccttgccctgcccaacagttactttcatcatcccattttccagattaggaaatcaaggcgcagagagcttcagccacttgcctgaggcccccacagttaagtgtctggatttgaaccctggagcagcctggctgctgagctgtcctggagacggggtactgtgcagtggtcggggtaggggtggagctctgccgtcgctgactcccgggctacctggagtgataacacagcccagtgtctgggcccctgcctgagactttggctggatgccaggagcccgagaccttccagctctttcctgtgtaaggcgccatggggtgaaatgaaagaaaaccccagttagaaggtgtccccctcttccttcagtccctcagctgccctggattttgaaataagacaccgcccgtctgtggggtgagcaggaacagattggaaccgcatttctctccccccagtcacagctgccaggagctcatctttctctgtctcctccccctgccgcctctccccacaagactgggctggatgctgctgggaaagtcaacaggaagtcttttggctgcggtggaggtgggggtctgtgcttccctggggaccgagatgagggctccaggttggctccggcaagagcagggaggctcacgtctctgcctgctggttttgcttcctgtcctgggagaaggtatccacatgtcccagaatgcaccctctgcgtgtacagggatggcttttgggccattcacctgaggtttattgatctttctctttggaactggagtggctcctccacggtggattgggctgagctctctgcctcggccgacgtctttccccaggcacttcctctcaccgtgccagggtgcaggttgctagtggatgggtcttcaccctcggggattggcagctgccacgctcatttcacagtcgagacaccctggccgaaggttctgctaagctccatggagtgtagggattttttttgagacggtctctctctgtcgcccaggctggagttcaatggcccaatgtcccgctcactgtgatctcgacctcctaggctcagcagtcctcccatctcagcctaccaagtagctgggactacaggtgtgtgccaccatgcctggttaattttttaattttaatttttttttgtagaaatggagtcttactatatttcccaggctgaactccaactcctgggcttaaatgatcctcctgccttggcctgccaaagtgctgggattccaggcatgagccattgtgctcagctggggttttcctttaacccttcctggcccttcccaggtgcaggacccgggcctcagccttatgtgttcttgaacagctctgggctctgtcctgtacctcctgggcgcgtggtcaggcctctcgtgacatcagcaggagactcaggtgaagaagcaggcagaacggaatgcttgctcacccagcctcggggccaggcggggcggccaggacagtagcagtggctggtgtggcttcctgggaggtcagcccattggcgtggccagcgaatggggaggggagcttctccccttgtctcccctcatttctggtctctgggcctccagggccaggtctccagagttctaggtggaggatggaggtcagggaagctggggtaagagcgggctgggggtgggtggtcaggcggatcctggaaaaccatcctctgcaggtcccgctttccccagggagcactcagggctggtcccggggagccgggctaatggtcacctcggatggtgcaggggtccatccccatgaaaccgggcccatccccatgaaactgggcccacagaagcttttggttccggttctgttctgccccctggctcttgcttccaaagtaggactcaggatagctctgaattccctgccgaaatgcagcttcctgggccctaacccagccctccagaaccagagtctctggggtgggccctctgcttgtctagcagcctccaggggacacttgtgcctgccagagcaagtctaataagcactgctgtaaacccctcgtccccacagccttctggttcgtctcccttttcctgctgggatctgcatcaggattaaatgccaacatcagggatcaggttatacttgtgaaccctgagacaatacctgcatctttttttttcttgaggctgtcttgctcgctctgtcatccaggctgaagtacaatggtgtgatatccactcatggcaacctccacctccagggttcaagcaattctcctgtctcagcctcctgagtagctgggactacaggctcacaccaccacacctggctaatttttgtatttttagtagagatggagtttcaccatgttggccaggctggtctcgaactcctggcctcaagcgatccgcccgcctcagcctcccaaagtgctgggactacaggcgtgagccactgcgcccggcctgatacctatatcttgaccaagctgctgtggaaacattgagttccccttgatagttttgtccacagagtgaatgtttaggaaccggcgaggcatctctcacccccacccagatggcggcctggaggcagcgtttctgaccctgtgatgggatttgtctctcttgtccaagagactttagagatgtggcccctgaatgtgggggcccctgttggggtgggaacgggagctggccctggccattgtccagtgaccccatctcagtgcctcgatcctagcaccctcgatctcagcgcctccccttccccggctccgcgcggagatcacgtggcttgcgctgagcaatcctccactgcccccgtcgcgttcctgctgcagggaagcctttccagggagccagctgacacatttggcctccattatttgtttttgaacaggaatgaaaggagagagtgagtaagaaagtggcaggaggtgggggttgcagagtaggggaaggtcagagagaggggaggaaagatctggaaagtccaggcatgtgctctggaagcaggtgccagcgatgagctcatctggagggtggccgcccgccctgagccctgcctggggccagcagggaacactctgccagggcatgtcgctgggagcctgtccttggctcactttctgctgctttgagcgctgagcagatttgtttccattttagggacaacgcaaggaggctgtcattccacccctcaccttattaatatttcatgaatcataagtgaccacttactgcgtcctgacgtactccaggcgctgggctcgaagctttatgcgcttcatgggatgtatctgcactatcgccgtagaaaacggttcctgttactactgcagagaaggcaccgaggcacagagaggttgaggaactggcctcaggccacacagctagaagcggctgaccctggctgtgaacacagggctgcttgactccaaagcctgagctggtttgcagcgaggctcatggtttctgtgccactgtttgagcctctggtcgagccccttggctcagtggggggcccagtgacctaccagctgttccattatatgttgtggacacctccacggcccacctgggtgggagggaaggggcttcaggaggtgggaggggtacagggaacacagtccagcctgcttgggcccaataccttgaccttcaaggtaccccttgagggtagcatgaggctaagctcttgttctcctccaggactctgttcctgtgagggcctcggggtcccttgcttttttctgggggccttgctggtcaggatcacagagaagctctttgctgttgatctttctgcctctgtatcttttggcaagccattttatgactcagttgctttgtctgtaaaatgggttgaataacattgtcctgcctcggagggtttttgggaggatcaaatgagacctgttgcacagaagccctttgtaagccatgctgactggcggtcgccgggcccccaagtgaatgggcatccgggcactgagtgtgtggactcagtactcggaaggaggggctggggggtacctagaactcctgggaggcttggacccctgctctgctcagattctgagcttctccttggccagtttaattcccatcagtagggtgagggtaaccaggacttacgcatagttgggcgaagtcgagtgaccacatgtggaagtctagcgtccttcatgcaaagtgggcaggcggccaaagtgagctctgctccagtccccccacccccggggctgttcctggcgccctgccctcccccagagccccactgacctgcaccatgtgacccgggcctgggaagatgggcccagctgtgggaggtcgtgcgggctggggactgagagtgccggaggagggcctcccaggaaaacccagctgcacaggaagccgggccagcggcctccggaagcctctgggctttgcaagctggactccccagatctgtggctgtggggccctctcctgcctgcagctgagagcccttgacccgcacctgagggcttcagaggtccgggagggggatgtgaccgtgtccccagggtgaagcccacccgagtgtcactctggatacagccctcacctcttcctggccccctctctggtcatggggacgctgcctggggggggttcccttacatggaaggagctgcagctgagctggcgggcctcgcacacccccaaggccgcctgacttccagcctccaagtggggttgcattcaccactcaggacctggagcctcagccagagagggaccctccactgcctctttctctgtctcttgggaaaggtagggtctttgtgccccctcccacccagggacctggcatgttgggaggctaagaggaagctgccccccgctcatctaccccccaaccctcccagccagcagagttttacctgtgtgcttagaatctgtgcgtggagccagaagtcacaaggttggcccagctgtgtctgaccctggttgtgcggtcttggacagtcccagccctcctggagctgagcatcctgatctgtagaggagaggctgctgtgccggccccgcagggccctgtgcagaggggagtgtgtgcggctgtgagttcaggccatgccctcagactggaggataggatcggaacagtgggtcaggatggccagagggtcccagcctcaggaggaggcctccacacctcccagcacctccacaccaggaaatgcagccaggcccccaggcctcccatgtcaggaagcagcaccccgccccccacctctggttgcctgggcctgagaagttgagcactcctcccgaatccgagtgccctctgacccctgcttgggtagttgtccctcctgaactgaccgcctgtcctacacagtcccctgtggtttgcccgacagggtggccagcgagtcccctgcacagcacacctcccccaggagtgctgcctgtgatgatggtgtaaagggtgcccccccgagcccccggaggcatgcagtggcgcaacagcgtgagcccaggagccccggtgagctcctggatggagaatctgttcagatcactccccagcctaaaccttccctgggtgtctgctgtgcttggggcgctgactcatcgtggggcggcctgtgagaccctacgtcacctggccactcccctcagcccctgttcactgcaccggtcccctggcctggctgctcctggaacatgagggctcatcctcacggaagaatattcacttgttccctcctggaaagtccctccctagacctcctggccgcctcattcaggtcttgctgaagcgctgccatcttggagaggcctccctgtcacccgcagttaaaacagccctcccatgcctgtgggtggctttctatggggcatggatgagtattggagagtcttgccgtttatttgttcatatgccctctgggagggcaggggacactgacttgtgttgtgggtgccttgcatgtcacgggtgctcagtgaatgcctgttaagcattaggggagcacaaaggagggaagcctctgtccaactggagcagtcagggaagacttcctggaggaagtggtatctggtctgcttagaatgtggcgatttgtctgtatgcagacattagattagagggcaaaggccattatcataacttagcagacagctacaagcagctaaggaattgctatgacatggactgctcgtgattggagctaagaaggagtcagagacagaggtccctgtgctctggcgtgagtccttgggggaggctgagctcccagaatgtggggccgcctgtgcagaggccggaggtgggagacacacctgtgagtgccggtgagtgtggggtgagccactggggctggatcagaagatgggaatccctaaacccaccaaccagccttggtgccctgggagtgacaggagacggggcttctgggggactaacccagcacaagtggacgagatgggatgcaggggaaaggacaaagctctctgaggctttgggaagctgagttagggtagagccatgacagggtgagttccagaagcaacacaagaaaaaatagctagactgggttttcccttcactgtgggagatgccccacctcacttcccccgtcctccgggctctggcaatgggctgggcacagtgaatgggttccatctgcaggagtggtcacaccccttgggcacagctgcctcatacactgtattgagatgggatccgaggccgggaagaacagcttcttctgtaggttgacattgtcagccttcggggagggaaggacggcagggggcctggagcatctccttttgccatccacactctgtgcctgcctgcagggtcttgagccctgtctgttctgcctcagtcctggtcaggaacttgttggagcccataggggcagtcaggctggaacaggaggagaccaggccggcaggggagccgagagggggccctggacagcacccagggctgagtcatcctgggcctgcccgacttgctatttggagctgttcccgcttgctcatcatgtgcaaggtcctgatccactcgggtctgtttaaccagcgcccctccccaggcccagttagcctggttttcgttcgattcatttattgtcatcagtgccatccttgcaccacgtaactagcctttgcagcatgccagccaccaagctcagggccctctgtgcatctcctgtaaccctcacagcaacccgggaggcacagagaggctgagtcgctggcccatagtcacacagcaggtatggggcattgccaggatttagccggatctctgactccagggcctttccagggccttgggtgggacactggcaaggaagcaaggtatgaacactggccctgccttggacagagctcggggacggtggcctggcaggcccagctgacacagtgaccctggtgcaggttcaaccattggcaaagtgttcaagtacacacagaatctcaactggggagacaggcgaagcggtcaagggagggctgtgagtgacaggtggacactgtacctactggcagatcagctgaccttggtgccttctggagcctttcaacttccttatccagaaaaagaggaactaacagttccacccccaaactgggtgggagtaccacattcgaaattgaagcaaagctggtcgtgtcacaggctcggcagatgttagctgtgcaggcaacttagtgaccatttgaagtaggctgtgcggcggcatcctcatcttgcagatgtagtccagagaggttagggcactaaccctgggtcacacagcgacagctcaggctacagagagcagtgctggatgggagggtgttggcagcttcaggcacaggctgggagggctgtggggtcagcagagggagggcacacttcccagctggtggggttcccttgtgcctcagtactcatgtgggcccaaaggagctggaaggagggaggttagagccacccatgggttcagaagctgataagcaggttattgactctgaatttgcctcatcgtatgtaaattggggacaaatttggggatttaatgatataatgtaagaagcagacatgtcacagccctggttatacagtcagtgtataataagtggtaagccgtcagaggaggcagccggtgagaatgggagcatctcagcagccctccgccccctgctcctggttgcagatgtacctgttcttggctatttgtgccccagctccgtgtcctccggtgtgtgtgaggccaagctcctggggtggggacttgggggtgtgtctgcagctcctgaggccaagaccaaggctgaggccgaggctgaggctgaggccaccttggtgaggaggaaattgcaggtggagaagctcgttgaccgtgaccttgatctgaccgtaattttgatggtgccgatgccgtcagcacgcaggcctcctgccctcgccacgactggctcctgcagcccacctggctgagaggtgtgctggctctcgcaggttgcaaaatggggacatcaccgtccgcctgggctacagcgtgctcgccgattgcatttggggagggactgagggctgattgtgttgtggggatgttggcagagaatcagagagggcatccaaaaaggccaacagttcggtggggagaggaggcgcaaggctggttcctgttttctgggctttgatcgaaagggaacaggggacacatctggggacagtctccttcctggaggaagaagggcttagggtgctggtgtggagtttgcacagatggggataatgagctggagggtgctgggcaggagctggccagtaataggctgacgagggaggccctgctggctgggcctggttttcaagtgagcatcctgagctgcggggacccagggggtcttagagacctcagagctgagactcgggaccacagaggggtgggctgtgctcagggcaacacagcggatggggcagatgttgcgaaacctgtctctctgcctctctttctcctgctacagaactggatcctcccagctcatggctgtcaaatcctttagatgcttctgggttccatgggcgccttacactggcttccctgtaggacagcagaccctgggggttggctctgatggtattcaccatggggtaccccatgcaagcacagtgctttcacgcccagcctcccagcctgtggagtaggcctgtgtctggccagcctcactttgtggccagaggagggagacagtggttctggagacaggagctggcctggggctgccctcccagcccctgttctcccagctcatctccttgccttgcgggtgctggccaccctccccccgccagctccatccccagctttctctgcccgagccgtgacctgtcagtagggggcagtggaggccttgaaagtccttggagaggactttgaagcagtttttacaaatctgtccctggaaagtctctcctgtcacacccccagcggctccctccctcctaacatttttcctggggttgtcatgcagcggggggtggaggaacccactaggccgtggatagagcagagccatgttgacacaaaccctggctgaacccacatgctccctacagccagcggccgatcactggaaccagggaagtgacctcatagcaagggcccgcagagcagccatcacgcattcccgatcttggtttctggacccagctctggaaaagaagccagatcctagccacttggagctgcctagggaagaccccagcctggtgccggctgacagctcactggaacttttcatctgcttggccaggtgatgccaaggggcagaggttagaagtgctaagaagcaggccgagggtggtggctcacgcatgtaatcccaacactttgggaggccaaggcgggtgaatcccttaaggtcaggagttcaagaccaggctggtcaacatggcgaaaccccatctctactgaaaatacaaaaattagccaggtatggtggtgcacgcttgtaatcccagctactctggaggctgaggcaggagaatctcttgaacccgggaggcagaggttgcagtgagccgagactgtgctactgcactccagcctgggcaacagagcaatactccgtatcaaaaaaaaaaaaaagaagaagaacaagaagtgctaagaagcatctgtcttcctgattgaaaagcaatctttgctgggcgtggtggctcacgcctgtaatcccagctttgggaggctgcggtgggagagtcgcttgaggccaggcgttcgagaccagtctgggcaacagaggtgctaggggtagtggcgcttgcctgtagtcccagctcctcaggaggctcaggtaggaggattgcttgagttaggagtttgaggctgcagtgagctatgaccacaccactgtactccagctcctgggtgacaggatgagaccctgtctcaaaaaacaaaacacaaacaaaaaaccaacgtttatcttttgtgattttaaaaatcacacctacttgtgacaaaataattaaattagaaaatgtaaaggaaatgatcaataataattgcgtcctccagacaaacactgttaacatgttcacgtttccttctagtctttttctacatagacactcaatacttattaatttgttttgaactaaagatggttttctctgctttgtatgagaaccacctcagccaggcacggtggttcacgtctataatcccagaaagctgaggcaggcagattgcttgagcccacgagtttgagaccagcctgggcaacatggcgaaactccatctctacaaaaaaacacaaaaattagcctggtgtggtggcacatgcctgtgctcccagctcctcaggaggctgaggcaggagaatagcttgagcccgggaggtagaggttgcagtgagccaagatcgtgccactgcattccagcctaggcaacgggagtgaaatgctgtctcaaaaaaaaaaaaaaaaaaaaaaaagttgccacgttgtcacctctctcagggattttcatcctttctacttttcgcccaagacttgccctgtaaaaggatgaggccaaatagccatgggagggtggtactggatgttcaaaaaaatgtttcgtggctggcgggacttagaaacaggttggggaggtttcagcagagggtggaccccagctgggggtggggggcagcaggggggcccctcacatgctctctctgcgtgtttcatggggctgcctgtgaggccgtgtgaaccagagcccggctgggaagccacatgctacctggactctgacctttcctggcagcatgaccttagccaatacgctcaactatgttcccctctgtaaaatgggctaatagaaatgtccactcgagacatgatgagaaacaaaggtgttcatagagcaaagtgcttagaacggtcctggcatgacaggagcccacatgtcagtgctgccgttggcatcgtcatcatcacggcggcattggctgctttgtttctcccttgtccctgtcaccttcttccctcagcaggctctcattcacttgttcatttattcatggccgaggccccgtctgtgtcaggcctggtgctgagaacgggggtagagagatgggggctgtgccctgctccctgacccaagggttccctttgcaatgtgaagttcttggagactggaccctcaggctgttccaccagcccctcctcaggccagcttaacccttccgtgctcgttttctgagctgttagaggaagagagcgggaggaaggatggagtggggtttttgtggggactgagcggggggtgtgtgaggccctggaaatggtgcctgcggcactcacgcagcattagcttttgctgcagttgctgtttggagaatattcttggatttcaggacactgatgacagaaggtggaacgctttttctggaagccatcaagaggggaccaccgcggcggctgagcagagttgctgacttgtgagctgtggcctgaccacagtcactgttctcatgagcgaggccccctgtggtccccctcccaggaatttctggccccttggcaggggacagttcagggctgggggtgggtagtggtgtctgcaggccctcttggagtcagagaatcccctgtcgccgtggcggggctgttccctcctgcccctcccctcccgctgtgctctcagctgctccgacaggatgcttttggcctgagagacagaaaccccaactctgaatggcttcagccctcaagagaatttggagcttttttgtgcaaaatgagatgttctgagcatcgaggatgctgtgggggatcctccatcccaccatctccagccgtggtgtccctctcggtcacaggatgctgcagccacgttgcagggaaggagagcctcccttcctgtgagcctagggagcccctccatgcagccccttcactggccattgcctgagacccgacctggtggctcctgccccaaggagcagaaagggggttcgctaggtcagggtggggctgggtgcgaggaccccccccggccaacagggtctgcttaggtgtccgtcctgttggggcagcagggaagggacccacatgtggcactgggacacggagaggcttttgtgcctgtgacggccaaaagggatggcgccccagccacgttcccacccaccccgaggcccagcatggccatgccggaaatagcagcatcgtccccctcactgtcctggcttgctttcaataggccagaggggtggggctggagcgggcgtctgacctgtggctggatctagctgcccgtggacaggctgtgagtgaatctgcagaggaagggagatgggaatgccgggaccttctcctgcacctcccgaacccccgttccctgtgagttagatggggagtgcacccctgccctcccctcctgggtatcccctgcgccccccgccccaggcacttgatgttgcctgttcattttccctctctgcccctcccgctggcccttcccatatggtcctaattaggaccttccgcccgttggtggatgggcagagaggggagcttgctgtggggcctcccccgatcgggggacttcccagcacagagctttctggcctctgcagggacgctgtgtgtgcctgtgtgagtctggcgtgttagaagcgctaagctgcagctgttctgtgcgtttttcacatttctcacttctcaaaggccctgggtttggtgtctgtgggctggggatctgtgttggggtctccaggaggcccttggtgggagaggcagggccccttcccctttaatctgggcaaccttgctttggcctgctgtctgcggaaagtgccctaggatacggtggcaggactggctggggttctggctccaggcccagccccagcccctgtcagacttaccctccttgtgcctccgttcaccctgtccacccgcagggcctgcaggagcatcctgagagttggtagggtggcctgcccggcgtccgcacagggtctgctggtgggtggctgaggctgcggtgaggtctccatggctccctcgtcctgcacatccttcccttgttgtgttgtctcgctagcatatgagcccgtactgcctctgagtctgcagcctgttttccttaccaggtggctaagcagggtggcagccagggtggcagagtcccattggcctgcaggggaccctctgtgggctgcaggtagtcccctgtggttgaaggtgccctggcaggacctgcaccatgacccccgtcaaagctcacgtccaaggcatttgtgggcacccccgccccagacgtgagggttggcatcttctcttgcacgtgaagcaaaggcctgtttgaaggagcgtgtggaagcctgggtgtgatgaaggcaaggaccggtggctcacccctcttgcacctggaccttgggtggcaggcctggggccttcagtccttaattcaggagggtagccagtcgctggaactaagagtgaacttcagctgttgttgccatagctggagggaagaggggaaaggaggcgctgcaggggagcagagacctcacccttcctctgccgacatcaggctgccggtgctggacggggccctggcaaccgtggcaggagtggtgatgtccgatgatggtaacaagggcttcctgaggaccccgagctgtcttaagggctctttacctggagtaagtatcccctttaatcctcccaacaacactgtgaaattgattctgttgttattcccatttcaccgatgaggaacccacagcccagagatgttaagtaacctgcccaagcctccctctgagcatggcagagggagggtccgaatgcggaaagtctggcttcagtgcccccatccctaaccactgtcatttacctcttcggccagccctctgattgcaaaacctgaggcccagaggagtgcagtgacttggccagcttcgcacggcaggttagtggcagagctgagcagtgtctcccatgccctgattctgtggcttcttgaggtggctcacccctaaacacgccccccatggtggctctgtttcctcctctcctctgaacctgccagcctgtgctcaggcagggggagaagtagagcaaccatgccgggcgggtcgtcgtgccccagtgccgcctgccctacacctgattggcagcagagtggcccctccttggtgtggtctggaggtgccagtggtcactcatcagcacagcccagtctcacacatgtcactcccaaaggatgttgacacagaatgaagcagctaggggaggcggacgctttggcacgagggtggcgtttctggtaatccgtagtgctgttgtctgtggctgcctttggctggcatctcacctcctcctggctgtcctgcagccacctgagggaggtcagcatgtcgccttcatcccaggacagtgtgaatgcagcagcgcaagcttgccagcgccgcactgcgggatctggaggcctttgctcctgagccctgcctctgtgtaatccctaaagcacggacttcttaggggcttccattcctccacctggaaaaaccttacaccgtttagggcttgaggcagggctagagcatggagacgttgctggaggaccaagggagaactgagcgcgtgttctcttggcctcagcctcgtgtgtgtgtttatgcatgggtactttgccatccacactggcttccacggctgggtgggagttgagttgagctcggcggctgcctttccaccctgcgggcctggttggggagtgtgaggatgcctgctggaagccaacgtgcacgaaagagttaatggtggatcccatttcctcagccccctctccagctttcccagggaaagggcaggaacagagaggccttatcttcagaggaaggggtgggcggggacacagcgctgttcggcacagtcccctctgagccaccctgcatgtttcattccaccgacttctgcagcccagctgttcagagcggatccagaaggtggagagagggtttccaataagcagaggatggagtgaatgtgagattcattactgggatttggcaaagcaaagagcctcactttctccccgcagatgggacgggggcggggctggagccagcggggtgggggtatccagcaagagctccttcccatcctcccacttcctttgccatgggccccctcctccacgcagaccctcagcctggaatgatcagtgtccagcttttctcgcccctctcctgccccgctggagggagtgacctggcccctggccccggccacctacacctcctgttttgctgcactagcctcgtggtaggggctgcggcggaggtgggcaaaagccgcttccgggcagccagcccccatcctgggagtgactgaaagtccttgggggttcctgcagggtgagctgcccattctggccctggtaaggacacccaggagagggccagggtgcctgtatttggggcacagcataaagaacagccgtaagtgtttctcaggcaggagggtgccgaagcattgggaagctgggatttagaagcattgtttggggtggtgagtggaagatgcaggacacagattcacgcgattgtgcagatcacctggcctcactccctcggtttacagtggaggaaactagaggccgagagaggtgaagtgagttccctggggtcacacagcctagccaggcccagggcgccgacctcctgctctgccttcccgtgcccattcggttggcatcagcatccctgccttgacacccccgtgtggcagctgctgtgattctgtgactcctcctcaccccaccccagtggggccctgcgagggaaagaagaatgccctatgcagaagtggttggaaagcaagaagcctggagagaagtgaggcctctgtggtttggcctgagtccaggactcatggcctggttcccagggatggagcaccgacccctcccttctacacccccaccccacgcccccaggagctccctatggggaagccggaatggacctgggctcagagattgtaaattcatcttgctggatgtgtggctgcctttatgtaaccaactctctcacggagaagccaggggatggctctcagtactctcgggggtctctcagtgaggtgggaggacctcgagaggtcaggaggctgctcaagaccttctgcccctcagggaccaggtgagggcttgtcgactgctctgacctcctgatgcttctggtggggagacctcagaggggcctgccgtcaccatcgccagtggccctggcctgcccagtcatccttctggggtggccaaactccatgctgcaaaagcccaagtgaaccccagtagtggcctgggagaatcatctgtcacgagccaaggatggagtttctggggaggactttctgctgccccccaacccctttcgggtacattctcctgtagccccactccctgtaagaaagtcaggtgcctcccgaagcttctccctggccccaggccagaggtgacagtgggggccccttgcttgcgctggtgactgtggctggttgttggtgcctggccctgccctgcactgtgcacccattgaaggcggcatcatccgggcctctccggtggccatgcatgggtgagcagcccacgacacatctgcttccagcatcgtgtgggccggggctttcagaggggctgagggcttggatggccctgcaggggggtgctcctggccttgtgaccgaaaggagctgaaggtttggagaagccgttgggccgaggtcagttcttatagatttggcgaggagggaacagatgctcacggagctgctccaggcactgcacacactgcctcactctgcgctgacagccaagaggctggttccccgccgacccccattttacagataatgtgctcccccagttccttagtggtggagccaggattcgaacccacgcaggcagcctcctgggcctgtagtcctacccttcatctccctccaggacctatgtcttggggttggcaggataatgactcccagagttgagcacatcctaatccccagcacctgggactacgttaggtgacatggcagggccagctaaggtcactaatcagctggtcttaaaatagggagatgatcctggatgatccacacgggcccgctgtcatcacaagagtttttaaaagcgcaatagaccatctgaggggtgcagtgggagaggcttggaaggaggaaggaggccacaagccaagaaatgcaggtgaacagaaaatgcaggaaaacgcagtctcccctgcagcctcgggagggtgcgcagccctgtggacaccttccctgtagcctagtgaggtggagtgtgggactaatctgtgttgtttgacatcacaagtgtgtggtcatttgctacagcagtgatgggaattgaatgccattaggcagcagtgcttctatcccggaagaattaggataaattcccctgtggatctcaagctctgggagattctgggctcctctggactgctccagttctgcaatcataggaaaggtctcccatgtctgtttgggagaagaaaaccccgtagcaaatccatttccccttttgacaaatgaaggcgagggtgtgggctggacacatgtttcctttttgtggattttttttgttttaacacttagaattctgtagctgaaggagactttggggggttgtctgcctgatttgcaagtgaagaaatggaggcccagggaagttaagtgactggcccagggtcatgcagagtcatgctggaatatcaagctagatagcccagttcctgctccaaagtgctttcctccctggttggggaggagggttggagggagtggaccccgagcaacagcagcattggcaggggttggaagagtagctactgtatccaggtgctggagcctctggccacttcctgcaggaaccaggtgacccaccatggcacaggcctctccctgtctatctgcagccctgggggccccagggaccagaggacactctggcctgagggctggggcctgagagaagagatggaagtacccctagtctggcctgcccccgtggcgtcctgcaggcatatccggcagcccaggggtcctagagaacttggctggtgggcgtccccaccttgccgcagctgcaccctgtggccagcagcttgcaggacttgggctgttgcctgtggccctgaaacagtcattttctgagctgagtggggatcaggtgagcagatccccacaccttaactgctgtgatctttctgtcctggaggctggtgggcagcctggttggtgcttcatggcactttatgaccggccctgtcaccaggctcgtgagttgctcccctcctttcgggcatcctgaacggcttccctgagagccccgccctgggccttcgcctctgcaggcccccgctgcctggggcgcctccttcccctggaagctgggcctctttggggactcattaagaagggccttgccgagtgctgccaaattgccccatctggtccccatttgttccacttaccaccctattttaacttttatgtctcctccttggctctaagatctgagcaggcagggcctgtgaggcaccccaggtcccctgatgctgccagcacccaggggactgttagtacatatgcagggagggaaggaatgaaggaagagatgacttggggagtcctccagttcccatttgtaactggcacattgcgacaaaacactcatggcattttacctttttcatataccttttttttaaatttatttttatttgagatggagtctcgctccgtcacctaggctggagtgcagtagcacaatcttggctcactgcaacctccacctctcgggttcaagcgagtctcctgcctcagcctcctaagtagctgggattataggcgcccaccaccacgcccggcgaatttttgtatttttagtagagatggggtttcaccaagttggccaggctggtctcgaactcccgacttcaggtgatccgcctgccttcgcctcccaaagtgttgggattacaggcgtgagccactgcacctggctttcgtatatctataaaagagaatttgcccagaaaatctttcagatgcacctttagggttttaaggcacagatacatgaagcttgtcagtgagcagctgctgcttattcctttttctcttccaattcagagcggcctgcgtcccaagcggacagctgctcccttcctcttggctccctgctgcccacgctcccacagaagcagggagaagaggcaggaaggtgacgcgtgatcatccgctgggcgcccgcacagtgccgtctgcacaggtgccatctcctttacttgtcactctcctcgctgagccctttcccctttttgcagatgagagagcattgcctcccagaggttaagaaatgggcccagagtcactcagctgatcagcgtgcagccagatttgaaccacatcctgctgatctccatgcctgcaggcctggcctgatgagatggacagctgggtggtggagaccttgagaccctggatggctcccaaatagggcctgtagctcctggacagggagagtctggcacaaagggtttgtggagtgagctgggggagaaggtggcttagggtccctgtctctgaacaaacagatggaggggctattccagcgttttctcagcctctggtgtgctgggctcctggttctgggaggagagaatggagctggcctccattctgggctgggctggtttgggcccaattcagacaagcttcttagtttgccatgagtgacacttttgcctgccctggtgtctctgccaaaaatatgaagggtttcagaacccccaccccggcctgcttccctcccagacttggagtgggtctggggctgacaacagtctcatgccagatagcctgagcagccaccagtgccatcaggtctgacactgcggcccctgccccggagggaaaaacaaggccctctctgggggattttctgccagcttgtgaaaacaggcctggagtcagccagcgcccccatgcttagacacttcgtgtggttttcaaagtgcttttatgttgctagctcatatgatcttccccaaaaccccataagggagggcaggaagtttgagcaacagcctgtcaagcacccatacagcaggtggtttcattgccctccatttacagacaagtaaactgagcttcagggtggctaccgcttgtctcccaagccacccagccatttagccacggaagaggtcatgactttttacaccccagtgaagctgaagatttttctttccgtttttaaaaatgtttactccccagggcagtgaacacctggtgcctctgtctagcgcaagaggtgaacgtttgccacttccgtttctttcctcctaccagacctgaccctccttttgtgacgggaacatcctgcaggcagtctgtcctgctttcatagactttgagaaacggggtccaaattgccggctgtgggtgggacaggcgacactgcagtgaagaggtggagtatttttgtagcggggaagaaatacatttcctctaccctcttaggttcagtgtttgggggtctgtgaattaaactcactcaagataaattaatgagagaaaagacagatttaatcacatacgtatgggatttcactgaaaaacgtgactcaaaagagcaggtagaaggtggggcccgtgactggtccgaaggtagtgagttatctcagttgattgttcacagtcagttacagattagactccttgttccactgtctcccctcttcccacttgttttgttttttttgagtcagagtcttgcactgttgcctgggctggagtgcaatggcacgatctcggctcactctaacctccgcctcccgggttcaagcgattcccctgcctcagcctcccgagtagctaggattacaggcacccaccaccacgcctggctaattttttgtatttttagtagagacagggtttcactatgttggccaggctggtctcaaactcctgacctcgtgatctgcctacctcggcctcccaaagtggtgggattacaggcatgagccactgcacccagccaactagtcttaaaaaaaaaaaaaaaaaaaaaagaacttagggcccgtatactatcttaataggaaaaaaggaaggggtgaaagcacatattatgggccgggtgcgatggctcacgcctgtaatcccggcacttcgggaggccgaggcaggtggatcacctgaggtcgggaattcaagaccagcctggccaacatggtgaaaccccgtctctactaaaaatacaaaaattagccgggtatggtggtgcacacctgtaatcccagctacttgggaagctgaggcaggagaattgcttgaacccacgaggcggaggttgcagtgagctgagatcataccattgcattccagtctgggcaacagagtgagactgtgtcttaaaaaaacaaataaaaaaaaaaaagcacatattatggcaaaacaaatgagtttttggaaagataaataggcccttaggagctgagatgggagatgtgaagtcttgtgacaatgtcttcttaggtgtggtgtggaaactactcacatcttccagggaagagtcagttgctcccagggagcagatttgggcctgtataccatcttaataggggaaatggaaggggcaaaagcacatattatgggctgggtgcaatgtgcccagtgcaggaggcagacgtggtttatggttgctgttgaaaccagtgcagggcccgattgctttgtattgagtgttgaggatcctggttttgtatcagccatgagtttgcagctctgggacacacttgatgttggctcaaggggaaatgaggttggaggggcagggtggttggattggatgtgggcctggggccattgctgatctacaaagtggtcatcacacgggaataatagagctggctacagaccacaaccagcaatattatttaaaagtaaggtcacacttttaataataagtcacattttaagttattatcaatttataaaacacactgttggtataatgatagcttttcaagaaggatataaaaaggcatgttgggctgggtgcagtgactcacgcctataatcccagcactttgagaggctgaggtcggcggatcacttcaagccaggagtttgagaccagcctggccaacatggtgaaaccctgtctctgctaaaaatacaaaaaaaaattagcttggcgtggcggcgcatgcttgtaatcccagctacgggggaggctgtggcagaagaatcacttaaaacctgggaggtggaggttgcagtgagctgagatcgcgccactacactccagcctgggcaacagagccagactccgtctcaaaaaaaaagaaaaaaaagaaaaaaagtaaaaaggcatgttgaaggtacctgcttgtggaaagttgcaacttgacgggaggtagggcgagcacttcttagaaaggtggaaatgggccctcctgctacagagacccacaaacatagactgaggcctgcagcctaggagactcaaaagaggcaaaggtgaataagagtcaaggtctccaagtcagggtctgactctgggggtgggggtcacatatgatggaggatgtcaggagggcttcctggaggtggtgacatttaccaggggggattttaggtggggtttgcgagacagtaggacctggctgaagagcgtaggctccttagacaggagtgggaattcaggcttgaaaatgagttggccagattgcaggggtcctcgaatgcaagggaagaatttcaactttaacagaggagcctgggaagctgtttgggaaaaggagtgataaagcgggaggggtcctccagcagagccctgcatgggcaggagggagcgagatgggaggtgggtgttggtaagggatgatcccagtggtccaggggagcagtcatagggtggaaactaaccttgtggggtctgggcaggaagggactgatttgagacaccgggaagaaacagccagtaggactttggtgagagggctgggggtcggggaggggggtgtggagagtgggagcttgagtctctgaaaacagacagtgttccaagggggagacctgaggcaagatgtggagaggcagctgagctgggaagctggaacggaggtgtggtcactccaggagactaagtcagggggcgaggggacccttgggagctatctagaccccagcactagggaatacggaggggagaaggaggggagaagaaccagctggtgcgtgtcaggcactgccctcgaggtcagatggggtggggctggatactggccatgaggattttttcaagagctgggttaatagtgagacgggcggacaccagatggctcgggctaagaagtaagtgggcggtgggaagctagaagccgtggtgtagacctactttgagaggttgggctgttcagacagggagaaagttcacagtttgaggaggtagataggtcaaaggaagagggtttgcttgtttttgagattggggcatcctgaacgttctcccaggccaagtgagaagaaaccagaagaggaacatgtcacccaaatgtgctgaaacagcccagcagctgcgctgcctcacagaaaatgtgcagaggcccctctgtcccaccatgcctgcctggggacggccttcactcgggctactcagggtttccccagcctgccaacccaagggtggcaggagctgtgggtgctcccagccccttctcaaggttggtctgtgggtagaaatgtgggctgcctcggggcgtcacagctacaaatgcataccagccctcagaaccacattcctgctccccagccctttcctccgcacccccatgcagaagcgcggccgccagctcacaaaggatagggagggatattgctcttggcatttgatgggaagcatctgctgcatcccattggggtgttgcccaggatggattggaaaagagttggcaggaaggctgagctctgtgctcacaacctggcttggtggtggccgaggagcttggcaggagcagagtgcaggacctgggaactgggggttggtgcatgtgtgcacgcacgtgtgtgtgtgtgtgcgtgcgtgctgggtgggtagggaggaagctgtgaaaccacatcccctcctctctgctgctgtgttgctgtgtgtttcagcagcacgtgggtgtcaccacacttcctagcaggtgtcaacctccaagactgttctgggctcttctcccagttggctgagttggaggtgggagtcccaactgtcccctgtggcttccagagtgggaccttgctgtgggataggctggccaatggtgctccctcccctgtgacccttctgttgggtgggtcacgaggaaggactgtgggtgttgcccacagacaggtggacatgtggcaaggacaccttgggaccttctttctgacgccccttgaagggggcactttctcagctttgagatgagtctctgtggatgtgggaagttcactatctcaagagcagcagccttggaaaatccaacacagaaccccgagtaggggcgggaaggggtcctgtcccgctcactggctgcctggcagagttctgcacaaggaagcgcctgtgttgctgtgggcggaggaatggactgagggctacattcgcttcctgttgccgctgtaactgcttatcacaaactcagtggcttaaagcaacagaggctccttcctttacagtgctaagggtcagaagccgatcagtctcaccggactaaagtcaaggtgttggcagaatccattcctgcctcttccagctttgggtgggaggctctgctggagttccttggcttgcggctgcatccctccagcctctgcctccatcctcctacagcctcctccttctctgcagtcagatctccctctgccttcctcttttttttttttgagacggagtcacccaggctggagtgcagtggcacaatcttggctcactgcagcctccgcctcctgggttcaagcgattctcctgcctcagcttcccgagtagctgggattacaggcatgtgctactacacctggctaatttttgtatttttagtagagacagggttttgccatgttggccaggctggtcttgaactcctgacctcaggtgatctgcctgcctcagcctcccaaagtgctgggattgcagccatgagccatcacacctggcctgcctccctcttaaaggacgcttgtgatttggggcccacctgggtaatctcttcatctcaacatcttcagttacatctacagagtccctgttgccacatgaggtaacacagtttgggaagggagagttattcagcctaccctaggggcctgtggtgtatctcagggcccttctgattttaagatataaagcaagaaaacaaactggctcaaggggaaaaaaggacacgttgaattctgttgctttaaatgtatatttttttattgtgctaaaatgcacagaacataaaatttgccattagtaacactgagtacattcacagtgtcgtgcaaccatcagcactgtctagcgccagaactttttcatcaccccaaagggaaaccccgtatccatgaaggactcactccccattcgccctctccagcccttggcagccaccagaatgctttctgtctccataaattcatttttaataagtgcaattctgtgtgactttaaaataaataaacatgagcacgatgagttgcttattggaaggatatccatgcggggaggccggcgtgtggagtgcgtaggcctccggacgggcaggagttgaaggggcgtggatgtgccgccctctcctccccttgctctttccttggggtcactgcctgagtatccctctttgcaaatggccccaaataatgtctcagcccccacgtctgcatcgcctcctagcttcaggaccctccaccaaaaaacattccaagcttcagactcactcctgggaaaattccaatggcctcactctcccttttgagccagccagatcccatggcctgtggcgggctgcctttgagtcctgagcacctgtgagctagggaagcaggacaggcacacccagggaaggggaagagtcgtcgtcagtcacagtaattgatatctttggaatcgtctaagagatacttagcgtgtgcctaaaacattcatttctttttttgtttgttttttgagacgaagtctcgctctgtcgcccaggctggagtgcagtggcgtgatctcagctcaccgcaacctcctcctcccgggttcaagcgattctcctgcctcaacctcctgagtggctgggactacaggcacacactaccacgcctggcgaatttttgtatttttagtagtgactgggtttcaccatgttggtcaggctggtcttgaactcctgacctcaggcaatgtgctcgccttggcctcccaaagtgctgggatgacaggtgtgagccaacacacctggccacattcatttcttaggagaagctctgcattttctgaaagtgaaatgtccccaggcgggtgacactgatggtgggatctgtggcctcaccagtgtcttatgagagatgccgctgtgtgtttcaccaagctgtatcctattgtcctctaaatgtggcttgtagacatggtgccgagaatgatctgggaggttcaaatcataatatggtccaaatcaacagctctctgatgacctggtattatcctaggatcaaattgagactatccgaggatgggcgtggtggctcacgcgtgtaatctcagcacttcaggaggctgaggcgggcggatcaattgaggtctgtagtttgagaccagcctggccaacatggtgaaaccccatctctactaaaaatacaaaaagtagccgccggacatggtggtgtacgcctgtagtcccagctacttgggaggctgaggcgggagaattgcttgaactcaggagacggaggttgcagtgagccaagatcacgccattgcgctccagcctgggtgacagagcaagactctgttccccggcaaccaaaaaaaaaaaaaaaaattgagactctccgagctgcactgtccagcatgatagccactggctgcacggggccatttgaacacctgaaatgtggtgattccaagtggagaggtgccgtgtgtgtgaagtgcactctgggtttcagagtcctagcaagggggaaagaaaagaatatcaaatatctgtcatttttacattgattacatgttgaattgataatattttgggctctgttaagtgaatgatattaaaattaatatcacctgttcttacattttttaatgatttcctttttcttttcttttctttttttttttaaatatggggtctcacactgttgcccaggctggagtgcagtggcacgatctcggctcactgcaacctttgcctcccaggtttgagcgattctcctgcctcagcctcccaagtagctgggattacaggtggctgctaccatgcctggctaatttttgtatttttagtagagacagggttttgccatgttggccaggctggttttgaactcctgacctcaggtgatctgcccacctcagcctcccaaagtgctggtatgacaggcgtgagccactgtgcctggcttgttcttacattttttattgtaggtgctggaaaatgtaaggttgcgtctgtggcccatgtgccgtttctgctggagggttggaccgagggccagccgagaaggctctggggctgctctacctgaatgctgagtgtgtgctgagcggtagagaactttgagaagtgctgaaggacagaggctttgtgtgggggatgcagccccaggccggagatgccttctctgtgctctggagaccctcatttggtgacagcaagaggaaccactgcaagaggggcggccacctcagcaaagcacccaggatgctggcctcccagctcaggaatccagaggcagaggaggggaggaggctgggcttggaggagagcagggtcttgggccctgggaaaagcctggggggccagaaagctgggggacagattgaggccagaggcaaagagaagaaggttcggagaggagggccaaggaagaagggttctgcccacggggagggagaggcccacggggcaggggcgtggtgggagctgcatcctcgaggctttctgttgaccctgacacctggccagaaaggagttccttctggcatcctttgtcagcggtttctggagctgccctttaggggccagtgatgagggtgccctgggctgggctgcagacagtggaaaagacaggctcttctcactcccagtgctggggaaattagcttcttggaggaagggggagctgtattttctgagtggccgcacttcctggcctagacgtgtgtgtcttgctgtaattttggcgactggtgttggtggtgcccattttatggatggggaaggtcaaattccacagatattgagtgacaggcccagggccttggatttcagtgtttgactcagaacccaggtctctgatctgccaccagcctccctcccattcagatgggaacagggactccgggcatgcagtcttctcccagacactcccccggctctggcctggcgcccggagaccagtagcagcagctccccacggccgttcactgtgagggtggggagggccgtgggaccaggaggccttagggggaaagttggccatgaggagtgggaagcgacgggtcagatgccagtgactgctggctggggagccgctggacgtggctggcctgtttggccagtgtggcgggtgccccggggcttcagtcacccccagccacgtgtgggggtgcgggatgggaaaggtaagagtgtgtggagcccagtcagcactcaacatgaggtcccgtgggggctgcctgagggcgtagcttccagaattcagcccctggccctcagaaggtgtcaccaaaggcttctttccatttgagtgaatccctcccagcccccagcaagccctcggaacgagcccactcccaggcgctctctcctagtgtgggagtggccacgcccctgctgggagtgactcacttgggttcagaggtcgtggcactgagatgggtctggcagatcccagcgtccaggcccagcccctatagtgtcagctccctcctctggggacccccttgcttgtgcccctctgggtcccagcacatcccaggcctgcagggagggggagaggaagagactgactcactggccaggtcccccaggggctggagaggctggagaggcaggagctggatcagatctgaatccagaggctctcggaggaagagctcagggtgagctgcgcccccatcccctgcccctcctctcctgctccttctcccttccatggtcccagccagcaagcacctggggtagaggggacaaacccaggtggctgtgttccagccctggctgcaggtctgaatggctttctggggtggctggccatgctccctgagagcccagctgtggcgatgtctgagcaggtaggtgggggagcacctaggaagcaggggtgtcaggcagagcacaaggagagagggtgtccaggtcagtttcaggacctggctgagaggagggggctcctcacgggcaccgcctctggcaagcacagggacaagggcaaggacggcatggccagaggtccctgggagcctcttcccctctcttcttcctagcagctccccctcactcttcccagggaccctgtcactttcctttagcgtgtggcagctccttggcgtccctcccgtgccttcaggttgcttctgcgccgggcctgccgctgggcgcccctatctctgcctgccccctcctcctgctcccctcgccctgcccccttggagcaattccccaccgagcctcccttcccaggcagtcgaggtccctccctacctctgccccgcgctctgggaggctccttgttccgcgaccacaaagcccctttgatcctctgctcggctctgagccatgtgacccggtgggcgggccgcggctctcggcgcgtccagcgcagcccgacgttccgctgctggggtgagtcctgctcctttgttcttcccagccttgcaccactggctcgggggctctcaggtggcgcggccgcgaggcggaccctgatggccatggtggcggtgccgggagccacgctgtccctgggccccggcccgaggccggcaggaccgagcggggtccccaggagaggggtggcggggagctcgatctccacgcggggaccagattttcggcctcaaaatagaagaatagggctttgtgtggtcacagctatctctttgtaaatatttggccaactaagctgagtggctaagttctcctgctgcccggagcttcttggaacatgtttccttttcgcaaggggtttccctggcttccaggagggccaggaagaaattcgaattggccaccgctttctctaaaatcactccgctcaagttatcacccctctgggctcccgaagaccggctggctggaggctggagatagtctcaatgctcgaaatgccgtaaccgaagctccccgcggcgccggcactgggatccagggagctgctgctacagcgcagctctggattcctggatgtgttggatatgtgcagggcgttcctgggaggagcggggagggagggtgctgctggcggggctggtctgcgtgtgctttgcttctctacaatggcatgctgcgtgtcggccatgcagaggcatgtcagtgagcaggggctgagggatctccctaacggacctgctttcagagggtcttttcatgctgggagaaccccagagactaaatcatgcagccaacggggtggtccccggcctcaaagcagggaggggcgaggagctttgtaggcaatgccatctgctcctgaaacgccgtcccagtgactctggggactgactcagcctccagcctgctgcacttcatccctggcccctctctctttgctttttcatgtgaaatctgctgtgttttggtcagaggtttggggaacagctctctgctcatctaagataagtttgtaattcctttcctggagaaaaatatgccacccggaagcaggttgagcagtggttttctggcaggtctgttcggggctgtggagacagcacctgctggatcaggatggagttggaatttggtttggatcccacatgagaaaacccgttggaagaggaggaagcagaaaaaggccccattccctaataatgctgtgggttttcctcctccattcattgccaccttgccttgaaacttaatggggccacgtgtgtttccatgaatgtcattctctttggccaactcccccggcagccccaggagctccttttcaggaaaaggaagaaggtgtttgcttagcatctagtatacgagtccttgttggaaaggtgggattcttgtttctccttgggtctcttttaggctgagatgtggtcaaggaaggcctgtggtgtggctcgccttttttaatgctcgtctctggagacctgagttgctgctgactcccagcttgccccttctgtcccctggccatttctgtgtcggggtggctgagacactattgcattggccactttgtgttcccactagcccccgcccctgtaggctgtcattgtgatggtgatggggccaattcagctgcggtggggaggacccactgtgtgcgcctggggggtggcgtggggcactctgggatgagaagatgcgacttctgccctgagagccctgctttaatggaaggcgggggcatagttgcaggcagaagccatcaagcactgtggtcagaccagcattccatgtcaaaaatggccttgttggccgggcgcagtggctcatgcctgtaatcccaacacttcaggaggccaaggcaggcagatcacctgaggtcaagagttcgagaccagcctggccaacatggtgaaaccctgtctctactaaaaatactggctaatccgggcatggtggcgcgtgcctgtaatggcagctactcgggaggctgagacaggagaatcacttgaacctgggaggtggaggttgcagtgagctgagattgtgctactgcactccagtctgggcaacaagagtgaaactctgtctcaaaaaaaaaaaaaaaaagccttatctgggcctgggatctgtcctccgaacactgggtccactgtgctccacaaggactttcaccccggaagccctagacccacttgggcaaccagagtctctgggttgaccactccccagccctggccagcctcctgggccaccgtattctcccaacttcctgttgtgccacggctggtccaagctgctcttatcagacaatgcgaggcacttccacaggaggggacaaccccgtccttaggagccccttctccctgcccccaggcctggtgcagtgtgtggcttccctgccggtgtcaaaggtctcaaggcccctttaagaagcctgtcaccaccaccagcagcttccgttatctggttcttctgtacatgtaagcctttcccatacaccccggatgtttagggcttccgccctctctccctggccgggagtgtgggaagagggctttatttcaatgcttgagagtagggtcaatggccagggtaagctgtgggggctcctccccgccggcccctctctgcagccctcaccttaacacagagcatcgataccacctgggctttgggaagacctggaggctgaccaccctggaggctcccagcgtcccacagccactctttggggaagaggcttcctgagggacttgtggcccttggctgggactctagtcccagagttctgccttccggcgccgagctttgatttgtttattgagtgccagcccggttcccggacaggtagggacctgttcccggagctcagcagagccttgggaagctttcccaggagggctcccgagggtggcggccatgcccagtccgctgtacgtgtgagtttgtttgatgaggaattggctgggaaggcgcgggtctaattacaggcccatgagggtccctctcgcccccacccaggaagcagcggagatcctggcacactcagcacctgggcctgtgcctgcccagctgctggtggaatcatgggagccttgctccggggcctgtagagcagcagtgggaaccttccccacctcagcccctcccagagttggctgttcaaactcgccgccgctcagcctcttcctcctctctttcatcaaccctgggaatcgcacactgcccaccccaccgggccccggagcgggtgcaggaagagagagcttaacacccagaggtctgggccttctgcaggcgcctgagctgctgtggcctgagctgggttccctgctggaaccatcacagtagacctaatgatctgcctgcaggagttgcttcatcccagccgactccggggctgcgggaaggggctgggccttggttttgctgggggtggggggtcagtgcaaagggcctgaaaagtggcagaggtgatggcccatctgtcctccccctggccggccggcctaaacgcgattggctctctttcttttttttttttccctcccttttccctataaataacactaaatgcgatttgtcaatgcattcatttgggttcagtagttggaccatgggcagaagcactccagatttgtcactttccctaagctaagggtggggaacaccctctgtgagatcttggctcctgagcgcccaagactgctcttggaaccccaactctgggtcggtctcaggggactgacgttgatggagttgctgacattgacctccggcctctgcatggccttcaggaagggggcccttcgctctctgtcccgtcgagcctggctggcagcactcccttctcaggcctgtgcccccggcagggcctgctgcccccgccctgctctgtgggtgccaggctccaagcaccaggtgactcggtcactgaatggtcactgaacagtcatccttgctggtgtccccagtggaatgtgcatggacgtcctccctcccccagatccttgtcttttatctctcagcctttgttccaggggccaccacaggaccaggaggtacgcagacgtgggtggcacatccactgggcagattcagccctgaacctgcacgccccctccaagggggcccccagcgggcggggttgatggtgccgtctctctctctgtcactagaacggacatgaggattgtgtcttgtcgatccacgtcctgagttcccagacgtcataggtgcttgctcaacgagtgtttgaatgaatggtcagcattgtgtgaccgcagattttcaacttttatccaaatagtttgtggtttctgtgaggctatcccgagacagtctcacaagaatctccattctccctgcacgctccgcacaaggtctccttggggggtttttcagaaaaagggccaaagagcagcatttcctcggggatttgaacacgatctcccccggggcaggggactgccctggaagattcccggcaccgcttcccatgcgccacgtgactaggagggtcttggggcaggatggtgtcttttgtgccttgtgtgctggggccggaggaaacactgcccgtggccggtgtcatctgccagccctgaagactaatgatgggctggacagtggccccattgagtgggagggagaatcgctgctgtctgtagctggggggccgggtgggtgggagccgaggccagggagaacagcgcagacctggcacggagaggcctggaggaggagcagggggtctcagccacccagggtgcagggacgccacacgaggagcaggtgtggtgtgcgtcctcctgcgggttctccacctcttggcttcgttacctgcactaggctttgtggtgagagggcacagagtggaggaaggtgccgtggctagggcaggccacacgctgtgctaatggattgctgttacctgtcgcctctgtggttttgctgtcaggatcctccagcaccaggtccccaccaccaggtatgggccccacaggcactactggctccccgaagccagggacagaccccatagacaatactgagtccctgcagccagggatgggcccccacggccagtaccagatctcagggaccagcaccgggtacccacagccagggacaggcctccatggccagtaccaggtctcagggaccagcaccgggtacccacagccagggacgggcccccatggccagtaccagatctcagggaccagcaccgggtacccacagccagggacgggtccccatggccagtaccaggtctcagggaccagcgctgggtccccacagccaaggacaagtccccacggccaataccagatcccagtgaccagcactagatgtccacagccagagatgggcccctatggccagtaccaggtctcagggaccagcgctgggaccctggatgactgaaggagggcacggttgactaaagctgcaggagccagcctggccatcctgaggcactaagccatcactgcggtctcaggggactcagactcctctacttgtcttcttgaattctggaatcagacacacctgggtccagcctttgcccccggggctgtgtgcctgggatggttgcctcacctccctgaagctcagtgagatggggacggctgcacagggcccggcacagatggcacccgatggcacagggtcacctgcttgcatccatacagcctcggccctcgctctggctgcgtaccgagagtcccatgcccagacctctgctgagtctccaagctcctggtcatgcctcaggcctcccgtgagaagcatcactgcatggaccatgcctcgggacctcaccttgggctgggaagcttgctccatctccccaagtctcccctagaggcgccccatgtcccatcactctcactgcttgaggggtcagataggggaacccagtgtgggaggcccagaggtgccggagcagacgttaagcgagttccgtgtttatgcgctgggccttggcagacaccctgaatgagcctcttccccaggaaggagattggggtcccagtccaagttgtggcctcaaaccctgtgaccaagagtggagaaaaggcaagacccctcctcccagtcttccagaacagccgatagtggtggaaacatggggttcacactgaatttccttgtaacttgttgaagagaatttagcccacattttcaggggtggaggtctggccgatttggcagtgtgcccgtccccctggccacagtttactctggaccgggcaccctggtgccctccctcagtgacgcagtgaagtcactatgacgtgtttagttggtgagaaagtgcctcctgtaatgttttactcttcttagagggtgaataagccttgtttattataaataattatttacagaatacatgaggtttaacctaactctgggccacggcagcgtcccctgggtaaacccacgcgccaccctagctagagcctgtgcccccacaggcttcctggactcaccctgaaggggggctggattttctgcctgtcccgatgagagggctgcaggacagtccccagcgagcccttctgagggctgtaacctcttcccctggtattttcctgctcgccaggaatgtttcaagcttccagcagaagcctacccaccatagtcgctttccaccctgctcaccatccctcctgccctcactcattcagcagaccccgtgcacagcccagtgcaggactcagggtgggaaggtgtcccgggtgggctggagcaaggttcccagccagggcggggtcccaaggtgggtccacagccaggactgtgatttgggaggcccctccctgccttgttccagccccggcaccgccgctgtccttgtgctcagtggagactcactggctccaggctctaaaacctcagcgaggtctgcagacagggaggagccccactcgagggtagagtgactgccgggtccatttgcctgttacgaaccacgtggcctcagacctgccattcctcctctcctagagctatggtcttttgtctgaaaaatggataatgatggttaccatgtcagggaccattttgaggacaaacggggatgaaactgaagaggctcagcacggaacctggacacagaagtgctaattgtgtgttaccagctgcggtggctgccaaggcccaaccacatggcagccacgggctgagtggcgggcgggaagtggggagcaggagcatgcaagatgggcattcctgaagtttctgatccagtgagataagtacacacccagctctaagatggagtgtcccaggaaggtggagactgcaaaggccttgtggcgcaggagtgtgagctgcacctctgggctctctagaatttcaccagagctcagggaggaggtcagctcagatataggggcaacgggagagatgggagtgagaaaatggcttggcgtctggaagtggagcctggaaaggtgggcgtggggacagaggagggccttgggggccatgggcccatgcgtccaggaggtggaggcagtgaacggggccacggtcggccccacacgtggcaccaccagccctgctgagcctgcacctgctcctcaggccccctgagtgccactaccacctggcaccccttggtctgattcctgcttcctgcccgcctgggaagagtgagaccacttgcctaaagtcccttagctgtccttaaccattctggctgcctcctggccctgtccagggttagccgttgacctgaactgcctggtgccacctccccagactcctggggccttgccctggcaccaacagccacctccatcttcatcattcactcgcacattcacccagcagtgctttttgggcatccactcagcaatatcaaggcgctgagatgcggctgtggttaagacccgggcccggtctgtgaggacctcgcagttgccatttccccagagcacagccccagccaggcacactgtggggtccagaaagagaaactaatacattgtgttcgtccattttgagttgctataaggaatagccgaggctggggggttatttgactcacggttctgcaggctgtacaagtggtgccagcatctgcttggcttctggggaggccccaggaagcttttcctcatggtagaaggtgaagggggagctggcacgtcacatggcgagagagagaactcccagactctttttttttttgaaatggagtctcgctgtgtcagccaggctggagtgcagtggcacaatcctcggctcactgcaacctcagcctcctgagtagctgggattacaggcgcatgccaccgcgcccggctaatttttttgtatttttactagagatggggtttcaccatgttggtcgggctggtcccaaactcctaaccttgtgatccacccaccttggcctcccaaagtgctgggattacaggtgtgagccacctcacccagccctcccagactctatagcaatcagatctcccggactttgtgaccgtggggagggcaccaaaccatccatgagggatccacccccatgacccaagccccaccccccccaggccttacctccaacatcagggatcacatttcagcatgagatttggaggggacaacgtccaaaccatatcacacgtgacctctctgtgcgtgcgtcagtttctacatctggttaagcagtagaagctccttctctgttccttgttgagagagcggtgggggagaaatgactcagggatgggaggctggtcccccgaggggccctggtgtttgtggagtgggagtgcgggaaggcccctacgttgtgtgtgccgtgctgggctggctcctcacagctcaccgtggtgctccccgaggactgctggggaggaaagagctaattaacttggggacccagctgctgaagttatcattaaacttgagcagtccaggggcccctctccttctgggtcctatgtcacccagcacagtggggcttaattgaattttttctcatcccccaaggctcctggctggcgtggctggggtttgggatacggggagcgagagggcttgggcctcttccagatttggagtgggttcaccagaaatggcccaggaaaccgcgggggccacccccagcagctgggggctcctgtggtcatttcctcttggtcctgttgagcagccctggcccctggagccctcagcaagggatgtgggggcctgccaggccagggtcctcactgctgccgctatgcacagctgcatcttgcatccggggagtggggtgccgagtggggtgtttgggaggcaggttttcccttgtcccttctgcccagagaccttggggatgagttgagtgagacccttccggcttctgactggctgtgtttctgttgccatcccccactccttttaagtggaggtttatgacttccttctttatttaaaagggtcatttagtgacttagcagatcccagtctgtgttacccagggcccttttaaaaatctgtggggaggctgggcttggtggctcacacctctaatcccagcactttgggaggctgaggcgggtggatcacctgaagtcaggagttcgagaccagcctggccaacatggagaaaccctacctctagtaaaaatacaaaaaattggctgggtgtggtggcacgtgcctgtaatcccagttactcgggaggctgaggcaggagaatcactcaaatccaggaggcggaggttgcagtgagccgagatcacaccactgcactccagcctggacgacagagtgagactctgtctcaaaaaaataaaaataaataaataaaaataaaaatccatggggggacctctgtgtccattggctggtgtgaggagagggtgaggagctgcagagaaggtaccaggctgaggaccgcccccacccttgggctacagaattgaaggaggggacacatgaaagatgttcctagactcgggctggaggctggggacatccgagggcaaggacgacgctgtccctgctcttgtttgcagaggagtgcacagggctcaccagcttcttgttgctgtttaagtgatagctttatggagatagaattcacatactgtgacgttgacctttttaaaatctacagttcaatggttttgctgtattcacaaagtgattgtattagggtcatccagagaaacagaaccaatagaaggtgtgtacgtgtgtttagataaagagatttattattatgaggagttggctcacctcattacagaggttggcaagtgccaagattggcagagtaaatcagcaggctggagacacgggagagcccatgttgcggctctggtgtccacctgaaggcccaagacccaggagagccaatggcgtcgttccagtcccgagacccaggaaaagcgcatgtgtcagtttgagtctgaagcaggaaaaatctgatgttccaggttgaaggcggttaagcgggaagaattctctctcactcaggccttgtgtcctcctattcagaccttcaggcctttgtcacaaaattacaaagacctgatcagaacaaaatctgagaaaaaaccctttccttctatcggttttggattcattggctgggaccctggaaattagactgacagagattaacaggaaacaagcataacaattcaagtaagttttacttgacaccgagccttcataaggaaatgaagacccagagaaaccgttagcctgagcggtttttgttttgttttgagacaaagtctcactctgtcgcacgtccaggctggagagcagtggcccgatcacggctcactgcagccttgacttcctgggctcaagctggggcccagctgccggccccgggagctgctctgaacccactcttaagtcccagctcagactcccaagtagctgggactacaggcatgtgccaccccgcctggctaattttttattttttgtagagacagggtcccactatgttgcccgggctggtctcaaactcctgggctcgagcaatcctcctgccttggcctcccaaagtgctggggttacaggtgtgagccactgtgcccggcctaggcctgaacagtttttatttgttttgcttgttttttaaatttgtttgttgcttgttttgagcagtttttttgtttatttcttttgcttgtcttttgcccaggctggagtgcagtggcatgatctctgctcactgcaacctctgtctcctgggttcaagccattctcatgcctcagcctcccaagtagctgcgactacaggcgtgtgccaccacacccggctgatttttgtatttttagtagggatggggttttaccatgttggccaggctgttcttcaactcctgacctcaagtgatctggccaccttggccttccaaagtgctgggattgtaggtgtgagctgctgtgcctagcctaggcctgagcgtttttatgctgggtttgatgaagagtggaaagtcgtgggaaactgtgacagagcaacaaaagatgagctgaacagtgagcccgtgggggtctcggcaagacctgtgtactggggcccctctcagatcctctgtctctggagatgaggctgttcctttccgctgggtgtagggagggcacctcttacgtgaggggcttatgatctacttcagagaaggggcaggtcagtgagttcttcttggacctgccatttcttaaattccttcagctgaaaatatttactatgccaaggcactgtatcttggagtgtgcgttccaagccctgttgccttcaactgatcgggtgaggcccacccccatcagagcacacagtctgctttacccaggctcctgattgcacccttttcctgtttgccccgagaatactcaccagcagtgcttgtggctgcagcgttcaccccaagataaatttgccgggaagtatcttgcttttattattattttcacatcactctagtatatcgactttggaaacaaaagacatcattctgtttatagcattccatttttagtagtggtatttcctttaaaaaaaaatggtaattctcagctgggtgtggtggctcatgcctgtaatcctagcacttgggaaagctgaggcaggctgatcacctgaggccaggagttggagaccagcctggccaacatggtgaaatcccatctctactaaaaatacaaaaattagccaggcgtggtggtaggcacctgtaatcccagctacttgggaggccgaggccggagaattgcttgaacccgggaggcagaggttgcagtgagccgagatcgcgccattgcattccagcctggacgacagagcaagattccatctcaaaaaataaataaataaataaaatttaaaaaaaaatagtaattctcgatcgctgaaaatgtcaaatcctagagaacacagcattcctacaagtgatgttaacattgttcttgatcagttgttggctgaagattcatttgatgaatctgatttttccagaatagacgactcagatgactctgttgttttgcttagaaataactgcaggaacaatttaaaaaattttttttctttttaatttttttgttttttgagacggactctctctgttgcccaggctggagtgcagtggcacgatctcggcttactgcaacctctgcctcctgggttcaagtgattctccagtcttagcctcctgagtttagctgggattacaaggtgcctgccaccacacgtggctaattttttgtatttttagtagagacggtgtttcaccaggttgaccaggctagtctcgaacccctgacctcaaataattggcccatgtcggcttcccaaagcgctgggattacaggcgtgagccaccacgcctggccagtttttatatttaattttcacacagagcatccagtcagatttgcttcagcctcaaagagcgtgtttatgtaaaattaagtgagtgctggcagtgagctgaactttctaaaaggtaaaagggttaaatattaaactcatccaaaaacaccttcacagacacactcagaataatgtttgaccggttacctaggtgccccatagcccagtccagttgacacagaaatttttttttttttttttgagacggagtctcgctctgtcgcccaggctggagtgcagtggcgcgatcttggctcactgcaagcttcgcctcccaggttcacgccattctcctgcctcagcctcccgagtagctgggactacaggtgcccaccaccacacccggctaatttttttttttgtatttttagtagagatggggtttcaccgtggtctcaatctcctgacctcgtgatccacccgcctcagcctcccaaagtgctgggattacaggcatgagccactgcgcccggctgacacaggaaattaaccatcacagttacacagccatcgccattaatcccagcacatttcatcatccccaaaagagaccctgcccccattagccaatccccattcccaactccgggctctcagcccctagccaccgctcatctgccttcgtctctatgaattcacctgttctagatagtttgtataagtggaatcgtacagtatgtggccttggtgtctggctcctttcacttggtagaatattttcaaggctcatccacattgtagcaggtgctggtgcttcattctttttcatggccgaataatattccatcgtggatagaccacactgtgtatctcttcatctgctgatggacatttgggttgtttctgctttttggcataattctgttgtgaagaattctgcagtgagtgctggtctacaggtttttgtgtgaacatgttttcatttctcttgggtaattgcaagatcatgtggtttagccaaccagcctttaagccatgtgtctgctgagggacccaggcctggtgggggtgcattgctgtgcttggccagccaggtgctgcgagtccgtgtcgcagccatttctctgtgctgtgctctgaggttgtctcgccggcaccgggcactgtgagccccaggaggccaaagccccctttgttttatcttgagtccaggcctcgctccatgaactaggatgaatggacattgaatcaacgcagggatgggtggggctggggtggggacgcagagtgaccccgggggcctgcagctgggtcctggctgctgacttccagtttcctttgcctgttggagcccagaacaagtcagaaaggggaaatgcaaagttcgagtgtcttttctgtggtagactggcaggcctgggtgggtgagccacttgcagctagttgcagcgtgagagaggaagtgggaggggagggagagggtgagtttggtgtaactcacccctggaaggaggctgggctgaggctgggggaagtgacttttatttttctgagaggattcttccctggggccaacttcaaaccaagggagacaagaccttcctgggggaggctggaagtgctggggcccccaggtgggcaggtctcccagggccaacgtcttggggaagctataagttaccatgtttctggactgtcacacacacacacacacacacacacacacacacacacacacacacacacacacgagtaaactgtaacacaaatgtgtgcccatgaaagtgcccactttaaaccaccacacagcctgtaaagcgaaggccctggcccgcatctgggcacccactgcccagccagccggtaggcagtttgcactgtagtctgttaccatccctcagagatgcagccgaggagcccagctggcttggagggcccagtgggcgcagcctcaggaaagtggtcaggcccgggccaggccccttccccctcccagccttgggagaaattaccatatgaatgtagctccttcccggagttcgggctggaagggcctgggaggggacaggctcccaccccaggagcttccaggttccggctgctgcctgtgttagctgcgtgagcgtgagcgagccaggggtcactactgggtggaaggaagaagcgggcatttcttccaggaggtcaccgttggagtcccacagtaggtcaaccccaggccctgggtcctcgggaggaggagaaagaagagaagcaggaggtgtggagggtaggccaggaccagaaggcacacagggtcggggcagtgtgggagaccctgggggctccctcatttaaccagctaacatcacagcgttcataagaacacgctattactgcagttttattactttgctctgatttcagaaggcacaactgatgactttagggaacggagaatctgaggaaggcctcgcaggagagggtcagatgcgatcgagtaaatgtgagccgtctgtaaactgtagagtgcacgcacagcaccggtcagccctggggtcagtgttcccctggtgctcagctcggcctctgcaccttttagtgctcggctgggctctgtgggggtcagggctgggtctggtacattagaggacttctaccaagcccctggcagtgtctcagttactaaatccagtttgccagttactaaatccgctctgccggttcccgaatcactcttccgctggggccggccatgtcacgtcaggcttttcatgcaggacggcagatggatagacgctgggaccaagtcatccttgggccgcgagacgtctgaccttctgctggtgtctcagaagatgctagctctccgtggcatgtcttccacgcggtgcttggggaccagtggcctctaaggggcccccctgcctcagcgtggggagtggcctggccaaggtctcagtgtctggttggagccaggcataggctcaggtgtactggctggaggcctcctgcccatgggctctgcctgtcctgtgtccctggtccttactgtgtcttctgtgttcctgggagagaccccaggggccctgagcccagcactggggttggggagtgggcggggaagagggtggggattagggtccctggctgcagaacagccaggccccaagtccccactccactcccctcccaccgggcgcctcatcccacactgaccatttcctgaagaaaatttcctgaaccggcctcccaccccggctgtcccaggaagcccatccatccttccgccttaatgctttgtggctccagaaggatggtggaagccggaaatcatgagtctcattcacaggcggccacacaccgaagccgcggagacgccgtgggaaaggactctggccagcgcggccggcacagagggagcggtgttaccggggtagacgggaaccgtggctgcccccatgctggtctgggagagacgaggggccggacgaaaggacagcagactggccattcattcatttattcattcactcattcacagcgtcttactgggtgcttcggacgtgtaaggttttgtgggtagtgaatgcgacagaccccagacagcaatcggagggccacgtgtgtaagaactgagggacctaggctgggcgtggtgtctcaagcctgtaatctcagcactttgggaggcagaggcgggcggattacgaggtcaggagatcgagaccatcctggctaacacggtgaaaccccgtttctactaaaaatataaaaaattagccgggcgtggtggcgggcgcctgtaatcccagctactcaggaggctgaggcaggagaatggcgtgaacccgggaggcagagcttgcagtgagcccagatagtgccactgcactccagcctgggcgacagagtgagactccatctcaaaaaaaacaaaacaaaacaaaacaaaacaaaaactgaggaacccagtgtagatgagctatcccgggaaaacaagtgggagttctaggaacagcatggggaagggatggtcccggcagggaggacctctgtgggtagccttgttggaagagctgaaaggcagccagagaggctgtgcgtggatggaagctgaagagtaggttaggggcgtgtgttttgttaacaaagacttcaagcatttactgaccaggcacaacactatgtgcttcataaataaatatctcatttgatccccagcattcttatgagacagatgttattatcccatttcacatgtaagaacattgaggcacagagtggttaagttacttgctcagggtcacacagcacgtcggtggtaggcaggattctggagccacaggaatctggtatatcccaggtgcaatggaaaccagtcacggcttcatagagggaaatcatcagattagtaaattttacacacgccccctggtgctttgaggaggagggattcggacaggggcagctaatggtggtggctgtgagatgtgttgggttaacattgatgagagtttgggatggatgagtggattcggagtaatggaaatggagggcccaggcccggcccctggagatctagctgcaatagctgttggctggagaggctgttcacttagatgggggatggggtgggaggcaggtgagatgagagctccagagttcagcctggggcacggtcattgggttcaagatgccttcagatgttggggcttgacagtgacagtggctgcagatacccaggacccagcagagggcctggcacagcggggcccagggacacgtctgtgagtcaggctggcactcaagtgtgaatctggacaaagaaggtggcattgttggcattgaatgctcaggggctgggtgaagtcagctagggagaggggctctcaaggcaccaggactgactccgtgggtgagggcggaggaggagacggcagaggctgagagaatagccagagacaggaggaaggtcagcagagccatgcacagaagcctggagaagatttgaggaaaggaagggctgggtggtcgtcattccctgcagctaggaggcaagggtgacccctgtgtgtttcattcttcagaggattggtggctccatctggtcagaaccccaagtccagagatgcatctgagcttcatgccatggtgcaggcagcaggagccatggagcaggcctgcggggtcacggcctgcctgctgcttcctggtgtctctaccctgagctcaggggttgcttggatgccctgtgctgcatccccccaggcggtgttccagagaggatgaaagtggctatctcaaggtgtgaccaggtagcggtccatgcacactgctttttcctggggagagtctgggatggaagggtatgtgtgtgtttctgagactccttgaataggctccatgtacctatccacccatcttaccacccacccacccatccactcactcacccatccacgcacccacccatccacccatccactcatccacctgtcaacccatctatccactcattcacccatccactcatccacctatctacagtcattcactcatccacccatccactcatttacccatctatccatccactcatccacctgcccatccactcacccacccatccactcatccacccatccacccatctatctatgcactcatccacccatccactcatccacctatccactcattcactcattcactcatccacccatccactcattcacccatctatccatccactcatccacccatccactcattcactcatctgtccatccactcatctacccatccactcattcacccatttatccatccactcaaccatccactcatccacccatccactcatcatccgtccactcacccatctatccacccatgtatccatccactcatccacccatccactcatctgtccatccacttatccacccatctactcacccacccatccactcacccatccatctacccatcctctcatctatccatccactcatctacccatccacttatccatccatccactcatccgtccatccactcatccacgcatccactcacccatccatctacccatccactcatccacccatccacttgtctactcatccactcacccacccatccactcatccacccattcactcatctactcatccactcatccatctatccactcatccaccaattcactcatccacctatctactcatccacccatccatccagtcattcatccatttgctcattcatccgccaacccatccattcacctgcctgttcatccacctacccatccattcatccatctgtccatccatccacccacccactcacccattcacacacccatacacccatccatttatccaaccatccatccccatccttacttcagaaagcatttgaagttgctggggtgtgcacttggaaaatgcgtcataagctttcataggcctctctttggcttcctcacttctttgattggtctttctttcggacatgcaggattctgagcagctcttctgggaggtgggtgcagtccaggtaggctgcctgcaaagctaggaccgagggagccacatccaaggcactgtgggttcccaaggcgatggcactgtgggcccactgcttccagacctcctcaactcccaggctcctgagcaggaggactcctggggcagggcctggagacgggaagagaaaacaattccagtctctcaactcttgtcagtccaggtgggtgctgcatggattgggggcacctggaacagttggccccttcacccctttcccccacctttccagcccctctggctataatcagacagttgtgtgcgatgtctttctccctcctgaaggggtcatttagtcaggctcctactcatggcccaggaatgtgcccctccctgcctgtcccctacccccaagcaggccgtgcctccagccccctgctgtctctgaagggcctgggcatggggcagcctctgcagcatccccagggcccgagctgatctgcacagcagaagggaattgggggaaagctttttttctacccagcacctggcagggggccaccctgttgcaccccagagacccttgtctaagttttgttatttcagatgatttcataagttgggggaggcggagccccagcccccacagcccctgttgttgcctcactgctgagctctgctgtgtatctgctgacaggtctgctgatagcagaaggggctggagagagggaagctctgggccctgccctccccaacccctgcttaggggacatccctgataagaggaaattccagcctgtgacagatggccagtgtccacccacccacgggggaacttttctttctctttgtaagtttgcagatttgccaggaactaaaggaatctctggttgacaggccactgtggacatggctggagggctggcacgggctggatcttggggttgctttgaggtaggggccgctcctgctggaaggttccttggggtggggaaggcatcagggccattccctgaccctccctctgcagtggatccacttcagagcctgagacaaggcaagggggcagcagaaaacagaatataaaatagccccccccaccacacaccgcaccagaagtcagaggattcatccttggcctgccctccctgcagcctaagttctgagagtggctctttaggaagtgaatggtgatggtttgcaggtcagagcttgctctggcccaagattgatgtctcaataggccgcggagcctgggtgaaaaaactcaggctagggaggtggtgggttgcaaatgaaagaacagaggagggcctcttccagaaagcggcgggtggtgtgaggagcccttggaccttgtccaaatttgactttaccgactggggccaattgaaaccgtgctggcagaaaggcaaaactgcttgagattccttcctccacaatagaggagaggtttgcttgaaagggtttggcgagggaaaagctggaggaaccttggccggcagtaaaagtggggacccccgccccctgcctcgggggcgcctcggcccctgaatgaatgaaagaggaggctggatggagacagactcacaccacctgtcccttccaggtcctgcaaaggagcacacagggttcttgttggctcttccaccttgttagtcaccaagaaggagaaaacaccaacaggggaactgtaaagctgcagttttgtttaagccccatagtggaaaccggaaagagctccagctcggagaaaaatgcagctctttgcctttgcaaatccgtgtctttctctgggaggccagagccattgtgctcgatttctaagcagggtttcagagtgtctcaggaggggaaggcagagtctcagatttccggcatcccaggtcctaaccaggctttgaggagacgcttcctgtcccatacaaagtgtgaagtgtaatttgatttggagttagttaacaaattagatgagctgtgtgcattttaaaaattcagtccttgatcccccacccacacacatttgcacaatttggtcatttatattcagtgtttccatctttagaagagaacaggaagtccccagtgacatttatggagtgtttgtagtagcttgggtaggtcagtaggaacacaatgcagtgaaaagcagagttgagatgggaaaatatcctgttttcagagccccccagggatgacattccttatcgtctctgtccacccgctctggagtccactccgcaaacagcaacttgttctcacttgagagcttcctcctgccggagctcagggatggagagcagctggcctcagtcttctcctcttacctctttgtttctcagactcatcttccaccttgaataattgtttttaacctgctctccctcttctctagctgtagaacccagaactttgtgtgtgtggtcaaaagtttagagagtgctgcaggtaatgctgagataaccctattaaattctgtaagttctcatcacaccaagtttgtttgttttttttaattctcattttattttatttcattttatagggatggggtctcgctacgttgcccaggctggtcttgaactcctgggctcaaacgatcctcccgcctcggcctcccagagtgccaagttatttttttaactgggatccacgggcctagggattctttgatgaaccgttcaaaatacgtgtgtgtctgtctgtctgtcttcaatgtatacttttctagggagagtctttacttttcaccagaggtttgtggcacacacatgtcctgtactactgtatcagattgtgaattccttacatgttaaagactgcttcaaatctgtccggaagtctcggctaataaacatttaaataaatgaacttcaaattcccatgtgccaccactgttttcattctgactactctcaagcctgtagtgtcatctttttgttactgtgaagtagacactcaataaatacttgtcaaatgaatcaatgttatggtcctggtccactaggaccccaggatcatcgtctaccattattgtctatagtttctttaccatcttgttccagagcagttctttctctgaggtctgctcacctctgcacgtgtgtctagtttccagccctgtcgccttaccattctctttcctttacctgcatttcctgaactgttaatagttaacaatagcttctccctccacccactcactcatacctgaagtgagaagtcatcattgaggtctctgtggattttgtcagcccaacctggggcggcctcctggaggtggagttttcagatgagggatggacattttggtgtctgctgggtagatctacctgggagctttggcaggggccccagggcagctctgcctctttattttggctgtgggacccctggtgcactagggtttctcaagtaagcatctgtgtcctgggagagccataggcaggcctgagagggcccctggaatctgggacccccagcccggcccagtagctggtaccatcatctttcttgcaagggaagttatggaaactaagatgctaatgtgctttgataggcctggggtggctctaagccctgggaagagccctggcaactttccctggctggcgggtagaatcttctcctggcagttcagggctctgcctccagctccctgggggagagcaactgagggaggagctggaggccaaggcctcagtgctgagctgcctgcaccgcagctgcaccttctgggtcctggctgcaggaaccccatacttctccagcctttccatggttcccgaagacctggcctggggagggggtcagcagcctggggctcacctacctggcttcaaatcctggctctaccgcttactcgctttgcgaccctcataattgacaaaagccctctcggtctcggtttccttatctgtgaaatgggacaataacagtggctaccttataggattgtgtgatgatccatcagttataatagctcctgagcagcgtttagagtaacacctggggctcggtgcagtggcttatgtctataatcccagcactttgggaggccaaggtgggaggatcgcttgaggccaggagtttgaaaccagcctgaccaacattagtgagacccactctctaaaaaaaaaaattagagtaacgcctggcacagagagcccccagtaaacctcggctgctgtgatgagctttgtttcttcatttgttcattcattcaccagactttttgccggggcttgccgtgagccctacgctgctctgaagaaagccgggctggggtgagcgtgatggatgaggtgtctggcttcacaaaccctgtgtgggggggttgtggtgagaggaaaccgcacacatcattattcagttaccatcgtggggagactgtctggacgcagagagcaggctctgtgtgggagcggggagggcaagccctggttgcgaggcagggcttccccaggattcagcagggatctgaaggactttgcaggcacccagggagataggagaggaggagggagcagccctggccggacactgtcctcctagcattgcctgcatcagggactcactcagctttaagaagcccctttgtgggggacagggagcatctgttagtttataggacctgaagtgcccccatgggctcaagtttctgggaaggcctgcaggtggccgtagggctgccgcaggggtgctggccccagggtctggattcaggggagcctgcagagggagggcagctggaggctgctccagtgtgcattgttacgaggcaaagtaaggagactgctgggcccacgctgggccggggtggatggaggcaaggaagtcttcgccggggcaagggcaccagctgtagatgccggcagctttctcctggacacgggcctggaaggctgacagggtgtggtgagtgccaccggctcccctgccgtggcctggtcagtggcttcacaggcctccgtgggcaggaggaggatgaccttgcattctgcttggccaccattggcagtgacagacaaggtgtgtggggatgtggccatttcggtccgtgctctgagagccaggtgtgggttgggtttggggaagacaggggaatggcattgacttgaccctgagcactttgtcctggggtgcaggcccggctgtcactcccctggagctgggaatggcattgggcggtggctcagggtcccttgccccagcggcaccatctctgcatttggccagcaaggctgatgggacttgtgtggacatttctgggacgtagaccaggcagcatgacacacagggaggggtaggcagagaagggcggcccctgggtcttggtttccaagtcaggctttgcaagcctgctgtgtcaagccctctctcggcaccaggccaggtgggccagggtcagccctggggctgtgatgagtgtgagtgcccctaaagtgtgtcatgtccaatagctgcctcctctctgggcactgcctcccagccagatatcctacagcccccgtcccagccacagacagcaatctgattccctcatcctcggcaggtcctggggttggggtaagaatttgtcactaagtgcagatgttcccagagggtgctggctcagggctgcgtggattacagccctttcatccctgccttagacccacctgcaactctggagaaaagatggcccagtggacgcctgcggggaggagggagctggtccccaggatgagcagatttgggggcagtccccatcacgggaccggtgacctactgccaccagcgccagtgaatggcagaggggccctggcataaggcctgggttcagaatgggaacctgcagagaaactgtcaaggtctcccgccacctgacacctccgcctggctgccaccctagaaacacccttgctgcaagaagatgggggagtttgtctggggcatggtctggcgacaccaacttgagaacctcaggcctaagtgttggcctctgggcctcagctgtcctctgagctgtaaagctggctcctgggcacttgtggaaaacactggactctttattttattttactttacattctgggatacatgtgcagaacgtgcaggtttgttacataggaatacaagtgccatagtggtttgctgcacccattggactcttcaatccagctccactagaaatgactgccttctttcccttcttccgtccctccctcctcccctcccttttttccttccttccctgtttccttccccctccctccttcccttctttcccttcctctcccgtcctcatggggatataatttccatattacaccatccgccgattcagaaagcacagttgagtggcattttttcacaaccttctataagcatcacctctaattccagaacgttttcctcaccccaaaaggaaacgccatcctcggtacacagtcactccccctcccccagcccctggaaatcaccaatctgcgctttgtccctacagatgtacttattctgaacatatgactagaaccctaaaagatgtgactttttgtgcttggtttcttgcagttggaatgttttcagagttcatctgtgttggcgcacgctcgtgcctttttatggctgagaaatagtccgctgtgttgactcagcacgttgggtttctccacgcatctgttggcggatgtgttagttatttctggagccgggtgtgttgtgctactcacgggctgcactaggagctggggatatcactgagtaagccacagcctcgggcacccaggagctcgcagagcaggagctgggagggaggtcaggaggtgcatggcctgtttgccaggctggagagacttgcaaaaagtcactttgagccagaaaccagagcctgaggcctctgactcccagctgcggagccgggagggaagctctgcattttgctttgactgtggggtgacgtgtcagttactgtccaaatcagaacctttctgagagtcgacgtgggtactgctgataattagtctggatacccgaaagaatggaaagcagggacccagacagatccttgcacaaccgtgttcgtagcagggcgaggcctggaggtgcgatggggatctcaacggggcagctgccgtcttgctggagcccacggtctttggggggggtcacaggtgttaaccgcatatcatacaagcaggagtgtgaaatttcagggttgccaaattcagtgagggtcttgtgctggcctggccacttacagtggcatttcaggaaaaaaaatcactctatggacctcagtttccccattagtaaagagtaggttggactggaattctgtaccatccagtatagttgccatttatgaaatgtggctatttaaatttaaataaaaatagaaattccgttcctcagttggactagctcagtgtcaagtgctcagaagtcacttgtgaacacactgtggcaattcctcaaaaaacgaaaactagaaccaccgtagcatcccataattccacttctgggtgtggattcaaaagaatgcacagcatcttaaagagctagagatatttgtacacccacattcatagcggctctgttcacagtagccagcgggtagaaacaacccgaatgcccgcggtcaaatgaatggagaaatcaaaggcgggacaggccgggcgtggtggctcacgcctgtaatctcagcactttgggaggccgaggcgggtggatcatctgaggtcacaagttcaagaccagcctgaccagcatggagaaaccccgtctctactaaaacaaaattagccgggcatggtggcgggtgcctgtaatcccagctacttgagaggctgaggcaggagaattgcttgaacctggggaggcagaggtttcggtgagccgagatcgcgccattgcactccagcctgggcaacaagagcaaaactctgtctaaaaaaaaaaaaaaaaagggtggaacatacaaggaatttgactcagccgtaaagaggaagttaggatacctgcaacagcaagggtgaacctttcgggtattacgctaagtgaaataatttggtcacaaaaggacaatcctgtaggattccacttataccaggtccgtagagtagtcagattcagaaaaacagcagaatggaggttgccagaggcttgggggatggggctggggagttgtttaatgaggacagtttgttttacaagatgaaaaagttctggagatttgttacacaacaatgcgaatgtacttaacaccactggactgcacacttcaaaatagtgaccgtggcaaacgttatgacaattaaaaggaaaagtcacgtggccagtggctaccacgctgagcagcgcaggcctcggacggtgtcgtggtcacagacaatggagtgggtgatctttaccattgtttccagctgtctgagcaccatggtgtcctggggccaggatgaaagtgtctctgggtatgggggtctctgcttttcccacttgggagtcctgaaggcagaccccaaagctcacctggccaggtaggagagcgaggcgggctcttgcattgctctctgcgtgcgtgcctgcctgcgggccagccggggcctgcaaggccgcctctcgagggaggggttgcaggaatggctctcacctgtgcagaaggcaagccactgccctacgtcaatggcaaagatggggctcggctgcgttgtattattatttctcaagcggggcccctggtgggcaggatgtttggtttgatttgagtttctgcagtgagtgctggtgcctgtggagggacccagctgcagctgagccggcccctccctcgctctgggctccaggggcgttgggggcgagaaaggagagttcagggggcagcgcctccccccaggtcctgctggggagggttgagggatgctggggggaggtgggggcgggtaggggctggtcccagtcccaggcaaaatggctctcagacccacaggcagatggaagcgattttcggtcacgtgggtggggactgaactgctgccccgcaaggcaaggccccatgtctggcttcaggaagcggccccaaagccacatggtccatggccagatgcagggctgtgtctttgtttatttaaaggtcctggaagcccaggggagagtatttctgaagggggagcaggagcaggagcaaagccctgaaggcttccaggctgcgtggcctgggtgggggccacgtgggggcacagagagaggagccctggcctccaggtccgcctgtgggtattgctctcagcagtggagatgtgtggacccccccttggcatttcccaacaaggaattatattgttcctttgttcccccaattccataagataggaattcctgtgccctgtggaggctgagaagacggggaggtgcctgtgaggataaaccagcccccagtttctggcttccagagtcttttcctctctcacctctgatgcctcaggcctggggagcctccctccgacaccctctgaccgctccagtgaaataggccgagagggatggcttgaatcggctggggatgcaggctgcagccagggggctcagtgggcatttcctgagttcggttcttgccccgcaagtggaagggcagttgaactgaagtctcccactgcccctcctggcctggaagcctgcctcccaccttctgggcagagtgaggagtgggcgtgggccgggagggctgcctcctgtctgggagggctgctcacttgcctgtcacgggggatgagccccctgcagcctcccgtgctgtggccctggctcccacgccggctccactcccctgtggctgcccctgctgggtgcccaccggtcccagggaaaagccactcccctcccggaggactggcgggaggggccctgcctgggagcgtgccgtgtggtccctgtcttagcgcaggatgcctgaggccagatcctccctgggaggcaggatggggcaaaagtctccccgcaggcagagcagggcctggatgggcccaagcagggacgggggcacagaacagcagccgcccagcctgcgtgggagctgagggccaccaagggcagctccagcctgtggggactagcagaggcaccacctctgtgaccagcgagttgtctgcacctgcatgcgcatgcaccagtgagtgtggcgagtctgaggtgtgctgggacctggcccgtgtaccagccagccctgatgggaaccagccccatcctgggtacccctggaaccccactgtgtgggagcacctgggtcctcagcaggcgtcttccgggcgtccgcccccagccccaggcctctgacccgtgtgtggtgtcttaacagcagccaggagcagggccatcgaagggacctacagacagaagaggctttagtgatttcgggaagttcagctccacgtgccccacatacccaagagtaaaacttggtcttggcctgtgggtgtgcagcccgtgggcgctggccaggcacacaagacggccgcctgggtcagtccagggggaggcagatgtggtgcaggggcccccctcctccatgagcccaggaacagctctgcatccaggcacccgccctgcacccagcacttttccttctcccaggactgctggctcgttctatgggattgaacacacaactccatggggaccgacgctggttctatccccctttcttacaagaccatccatggggatgtgggaggcggggacacacgctggttctatccccgtttcttacaagaccatccctcctgtgtcttggctcgtggatcggcttctaaggcctttgagtggcagcaggcggtacagcttatctgagtagaggtgaaggagagggccaggtccacctgggtggcccgaggcagtgtggagggccaggagaggagagcaccctccacccttgtctgagcagccctccagggtacggagacaggagttcagggtcagccctgccttggagcgcagggggcccccagcttggcacagctcctagaagaggagatgaaaaagcctggccttgggagtctggggatggagctttgctggggaggcagcgtggctgcaggatggcagctttttagaggacaccacggccagggacatccacccgggggaattctcaggggtcgcctgggcaagtcgcttagcctttctgagcctcagtgcctcagtttccccatccaaggatgggtgtgacaaccacctggcaggcgcctgtgtgtgagcccctgttccgctctaactcctctgctgttccttccccagccactgaggcggctcccagctgcgttggcgacatggccgacacccccagagatgccgggctcaagcaggcgcctgcatcacggaacgagaaggccccggtggacttcggctacgtggggattgactccatcctggagcagatgcgccggaaggccatgaagcagggcttcgagttcaacatcatggtggtcggtgagtcctcaccttgcatgccactcaaccaatgccggaaaccagcctcagcccccagggcggcccacaagcctttgggcttggtcttcccttctgtaaaatggggcagcaaccctgacctcaaggacggattgccagtgacattgcgtgtgcatgcatgcgcctgggaggagcccacagcctccagcggctcctcagaggggcctgtcctgcacatccagggcccctgagatgactttggggagcccaggccggcctggagcaggtcctgatgagtggtcgctgcctctgagcaatgacgtcagcttgtgcagagggttctgtggcagctgtcccctcactgttgctccagcctggccctccaggctccccaccgcaccccaccgcaccccggccagaggcttcccagcagctcagcttcagctctgccctggaattggggcctcgtggcttccacaccccctggtggccccggagagctggaggtcaccacgggaggtcgtcgatcagcacgacctgggcagggtgagggggccaggctggagtctacagtgggccgcctgttgtttccaaagccccccaggtcccattcaaacctcacagggaccctgtgaagggggcgtcccgttttccaggcagaagcgaggctcagggaaggctgccaaggttccttagctcacagggcagagaaccgcagccaccgttttgactcccagaactgtgttctgcccactccacggggtccagggaggggtctggggaagtgcccccgccaggtcacaccctaaacaaaggtgagcttgcggggtttctgcaaggtgtctgggcacctctcaggccgggcctgtttctctgacctttgccagccgtgcacgtccttcctgcccagctctgtggacgcaaacccacacctgccagcccgacacctttctttcctcttctgcactgatctgggccctggctcccctggggtcttggtgtcctctctgcttcctgtagcctcatgggacccggctgctcatggccctgctgtgctcacagctgcctggaagctggcagcctgcttcaagggagggcggaggtgtggggtcccctcctacggcccccaccctgttctgcctgttgtgggggacgtgcttgtaccctgaggattcagggctgcctcccgggaagatggctggagagaaagagaggggagaggcccaaaggcagtggccaggctgggactcatctctgtgggctacggaggggctgccctgctccctagccagggacagggtgagaaggacctgggaacctctgcgtcccagccatggcacaggccttcttccggagctttggccccaaggagagggagaggcagcccagcagccctcgccttccgtggctgccactgtgacagccttgccctctgggaatggtgcgcaggaggccacttcacctgtctgggcctcttcgccctttcaaccctgagaagaacagtggtcctgattccccacaaaatcactccctcccagggatgccgagtgaggaacaagacgtggggcagctctgctctcctccctcctccctcccatggcagctgtgcccacctgcagaggtgcaggcaaggtggaggggcacctgtttggaggtccacagaccccggggagaatcccagctttgtcctaactcagcggggtgaggcttgtgtgtcttcccctgggctcctcctctgtgagccttagcttcctcgtccataaaatgggatcatcccataaagtgagatcaagcgagctaggccccgggcagggtccccaacaggttgtggttgttcgagaatttgcagcagtggtgatggtggttgtggtgatgaggatgatgggggtggtaatgacggtgatgatgatggggtgatggtgctagtggagatgatggggatgatggtgatggtggtggtgatagtggtgggatggtagtggtgatgtgggtgatggtgattgtgatggtggtggtggtggtgatggaggtgatggtgatagtgatcatgagggtgatggggatggtggtggtggtgatggtgacagtggtgggatggtagtgatgatgtgggtgatggtgatggtggtgatggtggtggtggtgattgtggtggtggtggtgatgatggtggtgatgatggtgattgtggtgatggtgatggtggtaattgtgatggtggtggtggtgatggtggtgatgatggtgattgtggtgatggtggttatgatggtggtaattgtgatggtggtggtgatggtggtgatggggatgatgatggtgattgtgatgggggtggtggtggtgattgtgatggtggtgatgtgggtggtggtggtgattgtgatggtggtgatgtgggtggtggtggtgattgtgatggtggtggtggtggttgtgatggtggtgatgtgggtggtggtggtgattgtgatggtggtgatgtgggtggtggtggtgattgtgatggtggtggcgatggtggttgtgatggtggtgatgtgggtggtggtgattgtgatggttgtgattgtgatggtggtggtggtgatggtgatgatggtggtgattgtgatggtggtgatgggagtgatgctggtgattgtggtggtgaagggggtgatggtggtgattgtgatggtggtgaagggggtgatggtggtgattgtgatggtggtgaagggggtgatggtggtgattgtggtggtggtaatggtgatggtggtaaaggggtgatggtggtgattgtggtgatgtgggtggtggtggtgatgtgggtggtggtggtgattgtgatgggggtgatgatggtaatgtgggtgatggtgattgtggtggtggtggtgatggtgatgattgtgatggtggtgaagggggtgatggtggtgattgtgatggtggtgattgtgatggtgatgtgggtgatggtggtgttgatgggggtgatgatgttagtagtggtggtgatagtgatggggatgatggtggtgttgatggtgatagtggtgggatggtagtggtgatgtggttgatgatggtgctggtgctgatgattgtgatgacagtggtggtggtgatgagggtgacggaagtggtgatgatggcgggagtgatgggatgatggtaatagcagtgatggtattgtgatgatggtgctgatggggatggtggtgatgataagggtgatgatgatggtgatgataataataaaagtaacaataataaagggatacaccttgcagtatcccagttggcatctcctagatctaaggtgtcgtggctggaacattgacataactcctgacctgaggttggccaggacacagacctggtggacagagagagatggacgaggagtgtccgtccttgggctactaaacagttcaggccagggattcccagcaccagcctctgtcctcccaggagcccacacttttcctagaaaggtgttatcaaagtcagaacatcagtgtaatttagggtgttttttgtgttgtgtttttttgagacagggtctcattgttgcccaggctggagtgcagtggcatggtcttgactcactgcagcctccacatcctgggttcaagtgattctcgtgcctcaggcatgtgccaccatacctggctaatttttgtgttttttggtagagacagggtttcaccatgttggccaagctggtctcgaactcctgacctcaagtaatccaccctcctcagcctcccaaagtgctgggattacaggcgtgagccatctcgcctggccgatttttgtttttttaaaagacagggtctctgtcactctggagtggcaatgatcctagctcactgcagcctcgcactcctgggcttgagcaattctcctacttcagcctcctgcgtagctgggactataggtgctcgccactacacctagccaatgtttacattttgatgtagagacagggtctctctgtgttgcccaggctggtcttgaactcctgggctcaagcaatcctcctgcctcagcctcccaaagtgctgggactacaggcatgagccaccacacctggcctagggtattttttttggtgtgttgctagcgtagcccaaggcagctctgtgcagggtaaagcaatggggctccgagtctggaggggtgtgtgtgtgtgtgtgtgtgtgtgtgtgtgtgtgcgcgcacgcgcgcgcgtgttatatgtgatttgtttgtgtgtgttgtgagagttgtgtgtgaggtatgtgtaagaggtatgtttgaggtgagttgtgtgtgtgttgtgagttgtgcatgtgaagtgtgtgtgttgtgaggtgtgtgtatgaggtgtatgtgagttgtgtgtgttgtgttgcatatgaatgctacttcctcatcctcgtttgtctcagtcacctgtggactggctgtctgcacacacggtcactgtccctcgagtggcaccaccctgcaggccagcgccccctagcacatggccccacagaccccatgggacatgcgtgagcctgcctgatgctcacaccagctccacgggggaaggactgtttatcccattttgcagatcaggaaactgagacacggtgaggtcaggtgacttgcccaggccctggccggtcagggaggagcagtttgaacacctgggctttggttgcaaccaccctggtgaactgcaggaatcccggccacctggtgcaccctgggcagccctgggctcctccgccagcccggcctctgtcctgtccaaaatctgagccaccaggagacctcctgtccagaaagcacaaggggcacaagagatgccgactctcccaggcccggctcacctctcaggagaggactgtggcctgggttgtgctggcatcagagcccggctgtgtgggtttacacagtcactggacacccggctcgagggtgaagtcctcgggggctgcttggcagggatattgccgggaggtagcccaggcactgctgaatctcagactggagagcctcgtgcctgggtgggaggggccccatgtgcagaccctgctggtctctccggagagacccctgaccggcctcccatcctctccccagggcagagcggcttgggtaaatccaccttaatcaacaccctcttcaaatccaaaatcagccggaagtcggtgcagcccacctcagaggagcgcatccccaagaccatcgagatcaagtccatcacgcacggtcagtggccgggagtgggctgggggtgcaggacgcccctgccttcctggagcacaggggttgggggtcaagaccatcacacacagtcagtggccaggggcgggctgggggtgcaggactcctctgccttcctggagcacagagtggggggtcaagaccatcacacacagtcagtggccgggagtgggctggggatgcaggacgcccctgccttcctggagcacaggggttgggggtcaagaccatcacacacggtcagtggctggggatgggctggggatgtgggatacccatgccttcctggagcactggtgcggtgtgagggtgcccgagtcaggcaatcccaggtccccaagacggggactcgctgtgcccaccatccccagcatgttgagcatgttggggctctggctgtgatgggtcagtgtcccggacccctgtgggccccgtcacactgagctccccacagacaactgagttttccaccaaaagtctgacaggcaaggggctcccaggggaaccgtcaccggcctgtgccggagttggctgaggaaggccattaatttcccggtgtctccttggttgtcatcgctgcctacctggggttgccccggggtcagtcaggtgtggggtgtctgtgagggtcttccgtctcccctctgactctgcgtccgtggctctgtgcagatattgaggagaaaggcgtccggatgaagctgacagtgattgacacaccagggttcggggaccacatcaacaacgagaactggtgaggcccctccagggggaggagcactagcgggggcttcagggctccctggaccccacccagagtcagccctagaggtttcccggcccgcgggggtgcagggcccacctcctgggacctgacatgctgccaaagccgcacgtctcaggggcctgaaaattctggaccaaagcagaattacctggggaatcttgctgtccccaactcatcacctgaggccagcccggggaggctggtttgggaggccgagggtaaggctgtggcatctccgctcagcaagccagacctcccagggcatgcatttcattggaaggtggggtgttgggctctgagtcctgggaatgcacgacctgcttggggagggcatctcatgtgcctgctgactcgtccccatcccccacgcagctggcagcccatcatgaagttcatcaatgaccagtacgagaaatacctgcaggaggaggtcaacatcaaccgcaagaagcgcatcccggacacccgcgtccactgctgcctctacttcatccccgccaccggccactcgtacgtccctgcagtgtcggcgtcctcatgccgggtgccctgggttccctctgtcccctgggactgcaagacggtgctgtctgccctgctgctgggtgcagaggggctgagtcaggggccatggccgccagctatgaagttgggggtgtgccatgtctgcacctccaaagcctcacactgacccctatgcaagtgtcctgcccagcccccatccttcagctgcgtcttggggagctgagggtcaggcaggccctgggctgttctggagcctggtggtctgtgtcctgccttctcaggccaggctctggcaggtggagtgggagcccccagccaagcacccgtagcggtgactgaccttctcatccgggccctgcctcatgggaccccttagagggtttggtgcgttcttagacgggaagcacagagatcagtgctggccccttccagggctggacggggctgctgttggtgttggtgagagccctttcctcccgccggctctgtccgcacctgacgtcgcccctagagatcagcaagggcgggaggctgcatgtaccctggcaggtggactcttcatggcctcacggaccctctgtcctcagctccctgtgcaccccctgccagacacctgtggctcaccctgagccagggctgggaggaggaggaccagaggccagcaggagtggctggtggaggcagccgtgggtggcttgtctgcatgggtgggtggagaaggtccttcgcacctgctgtcccagatgtacttccctgggcggaggaagcccaggggtttggggaaaccatactctgtgggcaccaggtgcaggaaggagcctggctggtgggcagcgggcctcacccagagtctgtgggaaaacccaagccggagttttcgagcccaccctctggcatcatcctctgtgggccagcaggagtcaggggcagggggccagcccgctgtccatgggcctctcctgaactgaacatctgccctcccaggcagaacggctcacctgcggtcctgtggcagctgttccagctgctccaagctttgcctcagctgaggctgatggcaggaggcagaagcctctcctgatgccagctgggcaagccgagggcgggcgggcggtctgtggcacttctgccactccccagcactgaccctttggctgggactccagctaggcatgttgcctggtcccgcccaaggcgtccagtcccatggggcaggggcgggccttggccatctctgcttaaacttctgcccggagcgggcttctccccagccatgtgtgtgaccgatttattctcactgtgggaaaagctcggctccagaactggggaagatggtgccccagttccagggccctgccagcccctgccacccacagctttccccacatcagaccccaggctcactggggccaagcaggcaaggggagcagcccgcctggtgcaggggagcagcccgcctggtgcaggggcaccgcacactggtgctagcttctatttctcttgcctctcccctcccagccaaagccccacagcaagacggctgctgagccaacgacagcccttctgtgtggacatgtaggggtgtggttgggaccccagaactcatggacgagggtgcttggagctggccctggcccgcctggcctgtgcagtggtgtcacctgtgtctgggacacacccgtgtccttcctctgccccacactcacagcgtggccgactcggcccggggccctgtccttgccagcagggacccccgtgagccccgagccagcacctgagagtgtcgacacctgcttgggggtgggtgcccccccactgccccgctcccccagatgagcctcacgcacatccctctgcttcagcctcaggcccctggacatcgagtttatgaaacgcctgagcaaggtggtcaacatcgtccctgtcatcgccaaggcggacacactcaccctggaggagagggtccacttcaaacagcgggtagggttccatctctacttgccccagcccttctgtgcaacctggagacgctgcaggcctggcaggggccaccccgtctaaaggagtcacactgtcagggagaccgaaccgctggtcactctccccagcgggtggctggcctggtggtccctggcccaggtggctgctgggggccgtccctgagatggcctctccagctcccccatatctcaaaagcagctttgtgggagtgccaattctccagcagagtctctgaggggggttttggagaagacctggaccaggcagatggtgaatctctcttccagggagtgaggccgagcaggggccgtgcgacatggcccaccttgttttatgccccccctttttttttttgagaaagggtctggctcagttgccaaggttgcaatgtagtggcacaatcatggctcactgcagcctccacctcccaggctcagtccccgagtagctggaattacagacgcacaccaccatgtctggctaatttttgtatttttagtagagacgaggttttgccatgttgcccaggctggtctctaacccttgggctcaagggatcctcctgcctcagcctcccaaagtgctggggttacaggcatgagccacctcacctcgccctgcctggtttttattagatggaagagaagctgggccaggtgtggtggctcacgcctgtaatcccagcactttgggaggccgaggcgggcagatcacttgaggtcaggagtttgaggccaacatgatgaaaccccatctctactaaaaatacaaaaatattagtcgggcatggtggcgggcgcctgtagtcccagctacttgggaggctgaggcaggagaatctcttgaacccgggaggcggaggcttcagtgagccgagattgagccactgcactccagcctgggtgacagagcgagactccatctcaaaaaaaaaaaaaaaaaaaaaagtttcaggagggatggtctctgccaccttcttctccgccaccgtctgaggcccctgctgtgggatagggaggggcatccaagcaagagggcagccctgggctcttcctcctgacagggcagcacatcagagccacatggggtgcctttcaaaatgaaaccgaggtgcctgggctgcggcaccacatctgcctcggtgggtgtgggtggggcctgtaacctactccgtcctggggccaggtgtcagggaccttcccagcatgtgcaggggaagacagtccacacaaagtgggtgtgtctgccggaggctacacacgggctgtggtctgtgcctgggcaggcgagcagccgctcactgggatgtttctgttgcacgtacccatgtcgggctgctggcagggagctgagaggttactgcaggcggggcccctgctggaactggggactgtgacgagggttttttaggaagggtttcaggaggggaggtctcggtaaccctgagtactttcttggggctgtgatgagcaggagaagagaggtgggaggtgctcaggacgatgaccttaagcccctggggagttgcagcgtcgctcaggacagcaggtgcacctgcagctgcccctcttccctccaggaggcacaggagttggaggtgattggtgtcacagccccccagagcctgcccttgaacccgagcctggggcagcacacagtgtggaggtcatgtggcaaacaccagtgggtgggtagagcttgccacagggatgggcccatctctctccctccttatcccagatcaccgcagacctgctgtccaacggcatcgacgtgtacccccagaaggaatttgatgaggactcggaggaccggctggtgaacgagaagttccgggtgagtggatccactaggatgttgttcccaggggacccccagttcctgctgaagggtgggttgggggtttggaggaccttaagccatgaaattatattcttggggccagagggcactgagcccaggtgtctgtacccagtgctgtcaggctgaggctctcgtttttgggggaccccaggctcagggcagctcctcccgggggcccaggggagggaattgccttcccgcacatgtgtaaccaataccgtctgcccgttccccaggagatgatcccatttgctgtggtgggcagtgaccacgagtaccaggtcaacggcaagaggatccttgggaggaagaccaagtggggtaccatcgaaggtactcgccgcaggcgccggggctccagacagatgggaagacagtctcttctgctgacccagagcctgtgggccacgcctgagccagggactcgtggaacctcatccactgccttgccccacccagagggaggggtctccttgtccccattcaacccttgggaaagtgagagggcaagtggcctgtgcagatgcctccaccccagacctccccccgggcagggaaagattcagggagacaggagctgggatgggggccgccaagttctggatcctggtgcaggctctttcataggcacctgtgtggccctggacaaatcgcccaacctctctgggcctagaaaaggggtgggctgtagctctgtgagccagatggaccctcggccccttaccctgctgaagttcctgggaccctcacaccttagtctcttgagtggctgttgtaaccaattagcacaaacgaggggacttaaaacaacacaaacgtattttcacagttccagaggccagaggtccgaaatcaggggctgtttccttctgaggccctgaggaccagcctcatccatgccttcctccttctggtggcgcctggcattcctagttgtattgtaaaggcatcacatgctctaatctctgccccattgtcacagggccttcttccctgtgtctctgtcccgtccctcctcttcctttttttttttttttttttttgtttgagacggagtctcgttctgtcacccaggctggagtgcagtgttgcaatctcagctcactgcaacctctgcctcctgggttcaagtaattctcctgcctcagcctcccgagtatctgggattacagtcacgtaccacccacctgacttaatttttgtatttttagtagagacaggatttcgccatgttggccaggctggtcttaaactcctgacctcaggtgatctgcccaccttgcttggcctcccaaagtgctgggattacaggaatgagccaccgagcctgccctctttccttcttgtctttggacaaggatgcctgtctttggacttagggcctaccctaagtggatgatcccatttggagatccttaatgaatctataaagaaagacgttttccaagtaaggtcacaatcatgggttccaaggcctggaccttgaccatgtctttgaatggatgggagcccctggggggccacagttcaacccactcctggcggtgacaccccgggagggatgggcccgaacgtttccttccccttcctctctctgtcccttcatttctcattagaatggaagaggggaaggtgcagagggaaatgcagcaggaaaagccactttgttctgggagagcacttggctgaaaggcccagtagagcaggaagcacaagtctcttaatcttccagggcctcagttttcatcatccacaaagtgggtgcagtgtgccaagattttagtgagttgagagactgtcccaaagaccacagagctttttgggaagctgttgctctaaaaaaatggtcataatgacaattaccaggaggcatcagacactcctgtgccactggctagacatgggttatctcgtttcatgtccgaagctccccgcacccaccctccttgcagagttgaagaggtgctgtgagcagaaaacctgccaagggacccagaacgggaggcggctctagaatctacagctccagccctgcaccagactccctcgagatgggagttcatgcctggaggagggtgtggagaggcacacgggcctttcccctgtctgcactcctcccctaccaccacccctgccgggcccaccctgcgggagctgcccagctgggtgcagcctgggtgttttccagtatccgcctgtggtgtcaggctggcttgcctccccttggcccctctgcctgcagttcctctcttcctctctgcccaaagagttcttgctgtttaggaaactttttatgaaaggcaggtttgggagagttagggatggatgggcctgggacgggccggcggctttgctatgggcgtgcctctgctgcaccctggtggccaaccttgagtaccgcaggtggccggtgacagaaactgtcaggaaatgcacaagagagaggtccccgcacctctctgacctgtgcgttgttgagcaccactggctccagctgaggaagagtctggaacctgtcaggacagttgtgaggtggtggggcccactttccagcagtcttatatgaggaccctggaaatgtgccttcagcactgctgggtttttatatcaggggccccatgagttcatagctgacctgacacccggactagtaagggctgtgccttgttcttgcctcccacttggtgaacagcatcttgaggtatctttcccatccttagaaaccaccccaagtattgtcaatagaaatgtggggtgtaattgatcacgccatgaactcatttaatcctcatgtccctgagaggcgggtgacgttattatccacattttatggatgaggaaactgagggaatgagagtaacttgcccgagccagggagtggcgatcacacactccaactccagcctgagagccccattcttcctgccggctctcgctgcccgtcagtgttagatgagagtgctgctggtcagtctgcaggaggttctagtgtggacaccgccctacacagggccgtggcaggagggcctaggcaaaggcaaccggcatagcactgagagcacttgagggctgggcaaggtggaggccccggccctgcctgctggcctaccaagtaaaaactagacatttttaacttggggaaaagccatgtggctctgcgatggggcagcctggagccaggtgtatgggttctgcatcccgctccagccttatgcactgtggagctgagacagacacagttcttgcgttctctatgcctcattttcttttcttttctttttctttttctttttttttttttttgagacgaagtttcactcttttgcccaggctggagtgccgtggcgtgatcttggctcaccacaacctccacctcctgggttccagtgattctcctgcctcagcctcctgagtagctgggattacaggcgcctggtaccaggcctggctaatttttgtatttttaacagagacgagatttcatcatgttggccaggctggtctcgaactcctgacctcgtgatccacccacctcagcctcccaaagtgctgggattgcagacgtgagccgtggtgcccagcgtctacgccccattttcgtaagataatggggataacaaaggaatcacaagagacacttgcaggtgtgtgaagacgaagttcatcacatgggagggcaccgggtgtctttatttgccttccctgcccggctccccacctccagtgatgccgttcactgccctccttgttaaaaggccttctgttatataacagttacacatgccaggcaccgcgtgttcatataggagttacgaagcacagcaataaaatgaccactctgagatggccaccagctcgagcccgagggcacttgtgggtgcccgtggtctcctgcccagtctccctgagaagtggccactgtcccgagcttgggcttgtatgtattgtgtgaagtgcacatgtccctgagcaatgtttagcattgctgattcttgagcttgtgaatggtcgtccacagtacgtagcccctgtgtgtgtccctgtgtgtgtgtgctctgagcgcacacaaggtggatggggccgtgggggtaacaccctgtgggccacaggttttctttaaaatcccagctccgattcctgcttcatcccattcccagcagcccagccccctgcctgtcttcaggcccctgctgggacgtcctgctctccctggtcaccccagtggtgcgggggcccactgccctggcttctccactgtggcttccttccatgctcctatttggcctggtcactgtgccatctcccattagccaggaactttctggagagcaggagctgagctgtccaggagcaggagctggtgctggtcactccagtatcccccagactgagggcagtgccaggtgtcctatactcagctgcagagcaggtggttcccctgccctcctgcccatggggctgccctcagactctgcttttggcaccagcatttctgggcagggggagagaggtggggtccgggcagagtttctccactgggacattaaagcccctcctgtctcctctcctagttgaaaacaccacacactgtgagtttgcctacctgcgggaccttctcatcaggtgagagacagggtgcttgggtggggctgacggcttcacccctaagagggccctacagcgggtgggggcagtgggtgtggggccgaagccctgggcagagtgggtgccccctgccacctgcctgccctgccctcgggaagatcttggaagcccatcttctgaaaaagaaaacccactgggaaatgaagcaggcagtgaagatccttttcaacccctgcgaagttggctggatgggaaggctgagctttgatccactgtggtctggcccgttagagctgcccggtggccactaagggcccagtgaggcctcatgtgcaggccctgccggcagcgtggggcgtctccagctccgatcccactggcctctgacccctacccctttcacctggctgaggcttctccttgtttcccttgagtccaggcaaggaggggaagccctgatggagagggtgctgggtgggtggtccctggagtgtgggccctggcctgggcaggttcttcctcagcaagcagctggcatggatgatgggaatgttatcaagaggaggggcctccaggttggcgggggcaggggtggggggattccgggagccgttctgccattgtggggatactgggctttccaacctccctccagattattcctcctgagctgcagaggaatgaaaatccgagcccaggacttttttttcctggggacaagggcaacccagccctttgccccaggccacctgcctgccacaggccatagtcctggaggccggtggtcacccactgcttccaccctgccagcaccctggacaccggcctggagcaacaatgctccagccctgtccctctgagtctatgcactgtccctgggccctggacccagggccatagggtggacccagagggagacacatgcactggaatatgtgtgttctgaccgagtctgggcttaccagggggactgacccttcccccaaaacgtgtaccagatctggtccaacatggtgggcctgggggaccccatggggagccaagcagtcgggatggggagtgggggtgggggcaggcgggcctgagtccgaggcaggccgagcagggcccctgccccgctgcccccaccccgctgcgcccacctcactgacccgcccgccccccacccccacaggacgcacatgcagaacatcaaggacatcaccagcagcatccacttcgaggcgtaccgtgtgaagcgcctcaacgagggcagcagcgccatggccaacggcatggaggagaaggagccagaagccccggagatgtagacgccaccctgcccacccccgggatcctgcccccaagtcatttccgtccccccccaggccctcccaccaccccattttattttatatgattttctccatttgtcatcgttccccaccccttcgacatgctgccaggaaacaagggaaggggcctccctccgagtgagtcagtgatgaggccgcggcctccccgaggttgtggggaggctgcactggagccacaggcaggggtgagagcacccactgaattgacatgaccctctgtccccaggcctggctccccgagggctcagaagagcagcttcggtgtgcagatcatccgtctgtgtggggttctcagtgccggaggccttggggtgggggccaggcctcgcacttgcagaggagcccagtgggctgcacgctcccctccatccccatcggccctgtcccctggagtgtgtcagagcccaggggagaatgcagcccaccaggagcacctggaccccctgcccgccacatggtgtggccatcactcagcccctacccctgccctgctcctaagggtagaaaactccagggtcccctgccaccgactgcccagccactccaagccccctggcagctgcccctcctggagcagaaagtgcctttatctcagccatccgcagactgcttggccagatgcggggacaggctggaatgagggaggcgtcttcatctccctgccatccccctctcacgccacccccgcccccaccgggctgcaggtgctgctgatgcgctgggatctgattgaggataaaaaggaaggagagatgacccctaccccctcatcccccagttttgaaaaggtctaagcaagtgagtctggtggaggagctgagggagggagccatggaaggtgccagaaggaaggttggcgggggcacgtgtgggccgtggcttgggctggtcagagtggcgtgagctgcccggcgcctgccctgcccaagtgaccagggaagtgtgtgtgtgtccatgtgtatgcgtgtccgtctgtctgtctagtgtctgggtttggcccaagactgggctgtagttacattaatgcccagccagccacccctgccactcacccttcctggcccaggccttgctgactctctgagctggggaggtgggaggccaggcgagcctgactctgttgatctacccgtgcctgggcccctcccctcagagcccatggtaacgaacccctagaaaggagagaacgggcgtcaggggtgcacagtccacagctgaagagcaaggtttcgtggcagcacggcccggcccctcaccctctgtccccacgaggggacccatgggggctgtctttgcagggcacagatgaccaaagtcccttcctgcttcctgttacctgtcttgctcctggggagaaagaggggcctgatgagactccactcaggtgcacacatcaccaggtgcatctgcaggcaccgggctggctgcttgcagccaggagaaggtcagcgagaaggagtgtatgagtgtgagtgtgtgtgcatggaagttggggcactgggcgtctgactccctccccacccaagagaggaaggacccctcaccacccccactggtgagacagtttactttgccaacttgccatgtttttgccaaaaccaagattttgaaggaaatgagtggccagcgccagggcccaggccatgtggcctgcccagcctcaatgtcacttggtggcggggtggggtgggggtgggcagcagcatcccagccttgagatgcttcactttccttctctgtaaccagactttgaaaaattgttcgtttcatcaggctctgttcctcaatggccttttgctacgtgcctcccgagaaatttgtctttttgtataaatgacaaagtgttgaaaatgtatttcctgaaataaatgtttcaaatgcagaaaccca

SEQ ID NO: 3 - DNA, 52626 bp, Artificial Sequence
  chemically treated genomic DNA (Homo sapiens)
ggaggaaggagaaggagtttattgtaaataataataattaaatagtttgggttgggttagtaaagggtgttttgggagtgttcggttatttttgtattttattttgttttatgtttgggtttttatattttttttttattcgtgtttttttttttttaaaaaagatgtaagtgtaataatttattttaaaaggtaagaacgttttttttaatattttgttataatgtagttatatggtggtataggtagtaaaattttatggaatcgattttatttttttttttatatttttttggatttttattgtatttttaatatatatttttaatattttattttaggttattaagttaaaggaaaagttgtatttatatagggttaaaatattttataatgagaataataagtaacggttgaggtttatgttttttttagtatttagttttttttttttaattattgtatatttaaatagatgattagatattgaaaattgttttttaaaattagtagtataaaggtttagttttatgtgtgtgagtgaagagggaagaaaggagaggtcgaggttaggttatggaagtattttttttttttatagtattttgaaagaagtgaagtggggttgatgggttattgttatttttttattttttaattggatagttatagagtattattttgggggttagtttattaattatttttttttagttaggtttgtttgtttttgtattggatagtaagggttatgaaatagattaggaattttcgcgtgttttttaggttttcgaagatggttttttattgtttagtttagggagggaatgattgtataagtagggtacgtagtttttatggaagcgtttttcgtttgtttagtcgaaatgataggagatggggtacggagttgggtttagtgtgattatagttgtgtgtgttggggatttattttatatttgttgtatttattttatcgtagtgtttttgagttaatttggttatcgtgtttttcgaagttggaggtacggtagtgagcgttgagaattaagtatagttaaaagaatttaaggaaagttttaaaagtttatgttttttaagtgttattttagttttggagataagtttttttgtgtgttttttagagttttcgtttttatgttttaggagtagtgttggtatttggagggtagtagtagtattttagtgttaagttttgttatgttgagatttgtgtttagtagggattggaggttgttagtgtggggaggttgtttatttatttgtcggttatttacgattttatttttaagttgttatttttgttgagattttaggtaggtatttaaaggaaatttttattttttttagtttattcgtatagtaatgaattacgtggtaggtagatgtttttttttatttgtttttatgagttttagttttagatggttttgggtagttgttttgatttgtttagttattttaggagttgatacggtagtggttttttgttttgtagtgtagaaggttgggtttagttatttgttttggaagggattgggttttaaggtttttttttggagaattgagttgttgagtgaatgtttatgaggtattggagaggggagttttatgtagtatcggtcgtttttggtgttaacgaagtttaggtttttatattttgggtggtacgttttaggttttttttttagtttagttttagggtaagtataggttagggtagttatgtttttattttgggttagggttttttttgttgtgaagggattggattaattagagggtttttaagtttttttttaattcggtggttttattatatttagtgtggttaggtggtttttaagggttgggttaagttatagaggataggtttggggtacgtggttgtttttgacgagatgaataggaatgttttatattggtatgtttaattttagatattttttgggtgtgttgggataggtagttatagttatagagttttttaatagacgttttttttttttaagtttttgggttgaaatttgtttgatttgggtttagtttagttagagagtagacgtatggaggaattgagtgtcgggggttattgcggaagagtttttttaaagtttttattttttttttttgtttgttttggagttatttgtttgtttttttttttgttttgatttttttgtttttttttttggtttattttggagttatttggttttttttttttttgttttgatttttttatgggtgagaaagatttaaggtgaaagttttttttttttttatttttttttagttatgagtattttagaaggaaaggggggagaaatggggaaattgtttttagttttaagttttttttttttttggttagattttgggggagtttgggttattttagcgaattttagaattagaaaaaattttttaaaagttattttaaatttttaaatatttgaaatatttaaagttaagtttttaagaatatttaatttaatgtttaagatttttttatttttataagatttattttagagttacggtttataaagaggtttgatttattaagggaggttatagttagatttttttttagtttggtttttagagtagatgagaatattaggtaggcgggagattgttatttttaattttagagatttttatttaataatattaagtttatttttcgtttaatttaggaggtttttttgtgtttacgattttgagtatagtgggtttggttttattttatgataggaattaagggagaaggtagaaaaggcgagcgttttaatgcggggcgttgtttgttggagggattttttatttggggtttgataggtttgtttttggacggttattgtgtatttttagttgaggtgagggttggggtttagggttagatttaagttataggggtcgggtaggtaggtatagagtttcgttttttggaggtaggaagtttggttttaggagggtattttgatagttttatttgtaatagtaaagttatatcgaggagtttaggttaggagttttttcgtaggttggagagagggtagagagttttggtttttgtggaagaagtgtaaggacggagtgtggaaagttgtgtggagaagagtaatattttttagtgtttggagggatatagagtttttatttgtcgtggaaggttttgggtagcgatgatattgatagatatggtagggaggatagttagtttgaggttatagtagggtttggaggtcgagtatggttatacgttttttagtaaagtttgtacgtagtttttgattttttgttattcggtttttaagttttagtttatgtgtttcgaagttgtgagtttttttatgtcgggatattgttgagtagttttagggaggggttagggtagggtagggaagagacgagttttttcgtatttttttggagggaatttgattgggttttggatggagaataaagttgtttagattttttcgttgtattagatgttaggtaggtcggagagcgggaggattgttcgggtttacgttttattcggatgttttttttttttttaggattttttttttttttagtattatgggagtttttgtggtatttgtgtttttagttttttttaggtttggttttttttttatagtgtttagtgaggggttggttcgtgttttttttggggattggtattgttagatggtagtaggggttttcggttttagtttttgttattttttgtttattttttttaggtgtatttagtttaggggatagttaggatgtagttagttaggttttgttagattcgttattgttcggggggaggtggaggttggcgttttggttttagtaggtcggatttcgtgtgtttttagggagagaaagatgggagggtaggaggttggttttgtagggtagtttgtgttttagatatatagttatcggtttggtgattaggggattttattaggagcgggaaggatggataagattgggttggtgaggttgttgggtttgtatggaaatttagtattgatttatggttaattaggtagagtagaggagtgggcgggagtaagaaagcgtttttagtttattatggatgcgaagttgaaaaacgtggttatttggttttttttattgtttgtggtcgggagtaggggttagggttttagtgttagggaggggttaggggtttgttgtttttttttttttagtagtttacggggttttagatttggggcggttgaaagtgttgagggttaggtttttggtttaggttaggtttttaagaggaaagtcgagtgggaggttgggggtttggaaaatatgggcgtggtttatggtgtttcgaggtggggacggggtaggggtgttttgttatgtggtttaggaaatggtcgtattgtgttttttggtttttatgcggagggtcgcgatgttcgaggttttgcggttcggttcgtcgttgagttcgtagttattgaggtttgggttgaggttggttgttttaaataggttgtttatgtgcgtttggtttacgtgattgttagttttagatatatttaggaagtcggtgacgttgttggttttagagttaggggggtgggtatgaggggatatgtaggtaggtatcgggtcgtaggggattacgtaggttggtattggtgaggtagtttcgttgttgtcgagttaggacgggttttgaatttgggagaggaagggagagatgttatcggttggcgggtaggtgtggtgtggaaggggttcgtttttttttttagagtatttttttttttattgtttattttttttatgaagttttttttgagtgtttagttttgatggatatttagatatttttgtgggggtggtttttatattttggtatttttgtttttagggttaggttagtagtagagggaaatttagttttaaagagtgattttaggttttattaagggtttagtggaagggtgatattttagtattttttagttggttttttatttttagatttaattgtagatttggtttttatttgcggatggtagttgtgttttatttatttttagtttttttttaggttttttatatttataggtatttgagtaaggtgagtagattttaattcggagagttttggtttcgtaggtttttttgggtttttattagtagtagggaagatggaggggttgggtgaggtgggcggtagggatttaaattttttagaaattaagggttagtggttgaggttttagggtttgaattaggaggttttagaattaatttaggatggaaggggttgttttaggagtggatagttagatttgagatcggattttttcgtgttaaaggggcgagggtatgtgtagggatgagttggttattttattttttatttgtgttattgggttttttttttttttttaacgtttatttggggtttttatttttttttattttttaggtacgtataaggaggtagaattagggtgtgggggagattcgggaattttttagtttatgtatacgggatttttggtaattttatgtgggtttttgttggtttgtttttttgtatgtgtttggagtatattcgagggaggtattttaaagtagggagaaagagtttagtttttattttggagggaatcgtatttttttttgcggtgtaggggaagggggatcggttggtttttattatttttttttagaagaggtttgagtatatattatgtggtgttgtaggtgaggtgggggtaggaggggtgaatagggttttgtgttgggttttttttttagttgtgcgtttaggtagtagagtttaaagttaaggagggagttagagttttattttgggaggatagagggaggttgagtttagggagggagaggggagaaagagaatggaagaatatagtgcgagttgatgttgatggtgtttgtgtgagatattttatattttttagttttatttttaggtttgtgttttgtttttttgttttatgaattttgggttgggggagagggaatagagggttggtttggttggagagttagagattatttgttagtatagaattaggttagggagaagtaaaggaggtaggggcgttcgtgttattggttggttgttgagtagggttaggttgggagttgaggtggaggttatgttagaatgaggtttgagtaggtagggagtagtcgtttttgttgggtaggttgagtgggggttaggagaggatttggatttggttaaaaatatatttttttaagtattttatgtgtttgatgtgatttaatattttttattttttgtattttatattagaataggggattggttgatagatatttagggaaaatgttttggggggaggggaggatagggttttagaagttgagtataggtatataagttttttgaaattgtataatttataaaatatttttgtatgattgaatttagattttataattgtttgataatagagttgagtagatgtttttattatgtttaaggtataggtgaagaaattgaggtttagagatttgagatttgtttaaagtgagaaagatttggagttggaaagataatttaagttttcggatttagaattttaagtttattttaatttggttacgagttttggagattttagagttcgttttttgaagagatttttcgagcggtatttgagggtttggtggttttttgtttgttttggtttcgatgtttatagtaaaagtggttaaagttagtggaggaaagagtcgtttttattgttttaatttttttttttttaaagtttagttaagtttggtttaatgattagttggatagattaattttgggttttttatattttggtataaataggtatatttttggaatgagacggaagggtagtttggagttataagttatttcggggtgtttgggtttttttttaaggggtttatttttagagtattaggggttggggatcggtggcggtagtttagggcgggatttatttgggcgtagtttttagttcgggtgaggaggggtagtttatatgtagtggagaagtgggttcgaatttgttgtatttgtttaaaacgttttcgttttttttatttggtttttcggttttggaattagatttataagacgcgaaaaagttattgttattagggtgagatgttcgtttggaggttttatttttaggtagtgtaaattgtttttttgagttttttattagttgtagtgcgtttgggaaacggtgcggttatatataaatattaattttggtttttgtttttaagagttgataatttagaattatttattttgagttgggaaggtattttatttttattagttatgggcgtgattttgagttagaatttttatttttttaagtttgagaatttagagtagttaagtgttattatttataaaataagttattggttattttagtagttatttaagtagatttttgtggagaagttgataaaagttataaatgtttttttagatgtgtttttttagataattatatatagttttgttatagttttttaaaaggtttatggttttttaaggtttattggtttagatttataatgtttttttttttgtattttgtttgtagtttttttgttggagatagttttttagtttagaatttttttgtgttaaagggagaataggggttttgttgggtaatagaggtagttagggaagattttttggaggagggataggagttgggttttgaatggttggttgaaaggaggaaagttaaggtttaggtttagaaatagtaaggtatattttaaaaatttaaagaggttaatttgaaggaagcggtgggagagaaagaaatagagttagatcgtagggggttttgattgttaagtgaagggttttttttttggtgttgtttgtagaggtagttgttataaaattttgtgtagaagcgtggtttgatggtgagaggaagtggaggttaattcgttattgagtataagtggatgggatgttggtttgattgggagtttaacgggggaggggaggtttttgagttagttgtgagtattggggtttttggtgacggggagtattgggttttttttttttgtacgagtatttttggaaggttgagaatttttttaaggtttaagagtaagagttgttttatttttggtttatgatttaggatttggagaaggggtgatggggacggggtgggtgagagagggagagtgaggagggattagtttttaggttaggaatggttttaggttgatttagagatggatcgtggtgttttttagagggaggtttttgttagtttgatgtgtatttgtttgttggttttgtagatttagatgtaagtgggtatattttagatagtacgttgtagatcgggagaatagagttatgataatagttttagttgtagagttataaggagttttgttaggtttttttaggtttaggtattaagaaagttaatttttttgaggtttagtttttgttttttaggtggaaatatttttttatttattacgattaatgtagttgttgagttaaatataggagttagtttttaaaatttttttgttttagagtttttgagttttttaggaattattgcgaggaggggagaaggaggtgtggacgtgtttttttatagacgttgtttggtttttttgggtatttagtgtagttggttaatggataggtttataggagtattggtattgttaagggttttagtttttgtatggcgaatggtattttatagtcgtagtaggggagatagatgggaaatgtagtttaagaatgtttagagtattttttatttgtttttttatagtttttgattttttttattgttttttgttagaggaaagaggttaaggaagatggggatgtattttatgttattgtgaggagggtgggggtgagtaggggtgtatattattatgtttttttatttttgtattaatttatttttttttttttaattttaagtatgtgtgtgcgtgtacgagtgtatttattagtgtggttatacgtacgtgtatgtgtgtatatatattgattgggggaggagaagttttttttttagaaacggattttttttttagtttggggttttagtttttgttttggttttttagggtttttttttttttagggatttttagggtttaggttttggttgtttattgggagttaaggatagatggggttttttttttgtgttgttgaaatgggatttttttttattagtggtttgggatgggagattggggttaggatgagagaatgaattagaggagtttgtttttattttatgtttaattttttgtaggtttagtttcgttttttcgttttttttttagttttttagggttttttgtgggggaagttggggggaggggagaagttattggaggtacggagagagatggtttttttttttttttttgttattgtgattgttggggttttttttgtgtttttgtgggttttaggtttttatggtgggattgtggaagtggaagatgtttttataggttttggaatagaggatttagggatgggcggggagggatttcgaagagggaaggaggtggttagcgtttggtaaaggggtttagagtggagggaggagttatgtgggggagtggaatgtggggcgcgggttcgttggagttgagtgtgagggaggaggagatgtgggttatttggggaagatagatgattaggcgggggagaggttagtagagttagtatcgtttttggaataggagtggaagaaggttaggttgagggatttatttgagggttgaagatggaaatggtgagaggcgggtgagcgatcggtgggagtagggttgtttattttttttttttttttttttttgtttttttgttttggggttttattttgcgtatttagttttggtttttttgtttagatttagatatgagttaggtgagtttggtcggtttttaatattttttttagtaaattggaggtagtaagggtatttttacgattttttttatgtttatatttgtaggttttgaggtttggagtgtttatttatttttgatttttggcgttttaggggtttcgagagtttttttttagatgttatattaatttttacgttcgtttttgtgttttttagttttgtatcgtaggtttgtttttattgtgtagttttaggaggatagttaattacgaggtttttattgttttttcggtttgaatgttatattttaggattattttagtttgggtttatttagtataggtttttttcgaggatcgggttgtgtaaggaattaattgttttggcggaggtttcgttaatcgtagtttatttggggttagggcggggtggtttagggcggggaggtttttgttttattgtttttagatattagttgtagagattggaattttagatagtagagagaggtttttgtagttttttggagtagggttaaattttaggtttttttttaggaaaagtttattttggggtttttattgtttcgtttttgtttttattattattttacgttaggtatttggtttgttattagttgagtatgggttttgaataaatatagtagaggtaggtagggggttttattattatttttttatttttttagggtattgttaggtttagggtttaatttagaggtttgacgtatatgaagattttatttattttgttgtttttatataaagaaaagtttttgaataatttggtatgtgtttttgtatagtaaattaaagttaaagaagtattaggttgcgatttaggagtttcggattttagtcgtagtgttgttattgagtggttgttgttaattttaggttatgattttttatttatgggttttttttttttcgtttattaaatgggaagatggggtgattatttttagtattatcgttttatagttttgtggtttttttattaggtgataagatatgtagtacgttagagtttttttttttgttttggttgttaggaagttttaagttgaagtttgtgtttaatggtaattatgaattttagtttaaatttttttttattatattatttttgtattttatgttattgtttttgtttttagattgaataaataaatttttaattgtaagttattttaattttattttggaagtaggtataagtgtgtgtgtgtgcgcgcgtatgtgtgtgtgtagagaatattttgttttagttgtatggtggtaattgaaaaatgttttgtgcgtttttgtttttatgttttgtatttaaggcgttattttttttttagtatttagtgaattttattttcgggtatttttatatatttgttaggaagtatgtatgtaatttatatatgtaaatataaatgtatatatatattgtatagaaaaggaataggtttattttatattaatatagtatttatagggttgttttataattagttatgtttttttttttatttatatttgtgggttttttttaatttatttgttggagattaggttagatgttaggatttttgtttaaatttaggtatgtaaggttatgtgagtggttggttgtttaaatttaagtgagatttgggtgtgtgagggtttttggatttataggaaagttttagttgttttgttattttttattaaatatttattaggtattggaggggaataaaatggtagttttgttaggtgtagtggtttatgtttgtaattttagtattttgggaggttgaggtggtggattatttgaggttaggagttgaagattagttaattaatatggtgaaattttatttttattaaatatataaaaattagtcgggtgtggtggtgtatatttgtaattttagttatttaggaggttgaggtaggagaatcgtttgaattcgggaggtagaggttgtagtgagttaagattgtattattgtattttagtttgggcgatagaataagattttgtttaaaaaaaaaaaaggtagtttgggttgggtatggtggtttacgtttgtaattttagtattttgggagattaaagtaggtgtattatttgaggttatgagtttaagattaatttggttaatatggtgaaatttttatttttattaaaaaataaaaaaaattagttgggtgtagtggtgtatgtttgtagttatagttatttgggaggttgaggtatgagaatcgtttgaatttaggaggtggaggtcgtagtgagttaagattatattattgtattttaatttgggtgatatagtgagattttgttttaaaaaataaaaaaataaaaaaaaaatggtaggttgtttttagggaatttatagtaatttaatcgtgtagttttttagtattatttttggtagttgtagtttttgaatagttatatatttattgataattattagtttttttttatattagttattttggaaaaaaagtttgtagattttattagagatgtttttgtttttttaaatagaaaatggttgtaattgatgaattttttattgatgttttagaataatgttgttgaagatgtttttatgagttaatttaagagtttttggggtttgttgaggattgtagggttggggtatttttgttttaatattgaagggtttagtttattgagttgtatggcgttttgttgattaaaaaaaaaaaaaaaaaaaagatttttttttgttttgaagttattgatttttttggtttattggagagggaaaaattgttatgtggtaacgttttatttgttatttttaatatgttttgggttggaaaagcggattgattatgatatttattttgtgttaaattgaaatttaaatttgagtgtgtgaattttgttatttgtattttggttatttatgggttttttttttttttttgattttttttttgttgtgaatttatgttggtcggggtagatatagttttttggataagggttgattgatttacggatatttattttttagatttgatgttttgcgtttggttttttttaattggtgggaatatagtgatgaataattagtgtttgattttaaggaaattatagtttagtaggaggggataaataagtaaaataacgtaagttagttaataattttgtaaagaagataaaataggagttgggtatagtgttttatgtttataattttagtagtatgggaggttgaggtgagggattatttgaggttaggagtttgagattaatatggataataaagtaagattttatttttataaaaaataaaaaaatttattttaggcgtggtggtgtatgtttgtggttttagttatttaggaaattgaggcgggaggatttattgagtttacgaagttaaggttatagtgagttatgattatattattgtattttacgttgggtgatagagagagatttagtttttttaaaaaaaataaataaaaatatttaaaagataaaatgggtttaggtatggtggtttatgtttataattttagtattttgggaggttgaggtgggatgattattttagtttaggagtttgaggttgtagtgagttataattattttattgtattttagtttgggtgatagaatgagattttgtttttaaaaagaaaataaaaaaaatttaaaaaatttttaagaagataaaataggatagtgtaataaaaggtgagttggtttgtttttgttgtgttgggttgggttgagttttattgggttgtgttgagtgggttgagtgtgttaggttttattgtgttgtgttgtgttaggttgagttttgttggaatgtgttatattgggttgtgttgtgttggaaggggttgtattaggtttagtatgttgagttttattgtgttgtgttgggttgagttgagttttattgggttgtgttgtgttgggttgggttgagttttattcggttgtattgagttgagttgagtgtgttaggttttattgtgttgtgttgtgttaggttgagttttattggaatgtgttatattgggttgtgttgtgttggaatgggttgagttgggttgagtgtgtttagttttattgtgttgtgttgggttgagttgagttttattgggttgtgttgtgttgggttgtattgagttgggttgagtgtgttgagttttattgtgttgtgttgtgttgagttgagttttattgggttgtgttttgttgggttgtaatgagttgggttgagtgttgggttttattgtattgtattgggttgggtgttttggttgttggttggtaataggggggttattgttttagttatagtggttaggaagattttttagaggaggtatgagttgggatttgaaaaatggagggggatgtagttatttaggtagaaggaagagttaaattgttttttgtttttgtttattgggatgttgtggatattgtttttatgtttgttttgttttttgtttaagagataggttttttagagtagggataagtaatttttttttgtgtgaaagagttaggatttttatattgtgtaaagtttagaaatagttagtagtagtttttttgtttttttgttggaggtttttttttttttgtaattttttattatagtgtagaagtttaatattaaagaggataaaagtagagtcgttttagttgggataggggtatgaggggtaggttaggagtttttatttttaggtttttaatgaattgaggaaaggaaagttatggtgtggttggtgggtagttaggagattttaattgtagttaagagtttagggataggttttgttttattagttttatttttaggtggtttttattgatttgtacgcgggttttagtgaggtttgtttttatggttagttgttttcgcgtatatacgtttgggtagtgggttttttggaagattttttttagtttttttagttggtagttggtgaaggtggttcggtttcgtcgttttttgtttttgttgttttttgagtcggttttttttaatgggttggggaggtttgagttggttcggttttggggtttttttattttagtttttttgatatttaggtagttgttgtttatttttatagtgttagagttagggggtaattttggtttatttagggagttttttttagttgagggaggaggaaataaagttagaaattaatggttgaattaaataagagaaggggaatgttagggggagagtggggtattcgggtagttattttttgtttttttttttttagagtttattggatgcgaggttcggagatttggtttttaattttggtttgttattaatttgttgtgtgattttgggtaaattttttttttaatttgagtttttttattattattttagattaggttttttttagtaataatgttatgtgaatttaaggtagttaatttgatttttgtgatttttaatttttattttattgattttgagtttttttttttagagggattttttgtattaggatttttttggggttcgagaattttgattttagtgttatggtttttttgggtggaagggaaatttatttagtagttatgtttggtttagtggggtttggggtgaggaggatttaggattgaggtagataggagtgtttttttttttttggtttagttttattaggagtttagtaggagttgtggagattttgttttaagagtttagtgttgaggagttaatatttttttttttgttttttaattttgtatattggttttatttattgtttaagagaagggttttttttttttgggggtgtatgggattgaggtatgggttatattttttgttataagtagtttttgtttattgtttattgaggttgttcgggtatttttatttttagtacgttgatttcgggtttgggtgggtgtatatgagtatagtttttagttattgcgtttggtagatggattttttatttatcggtatatttttagtttaggattgtaaggacgagttaatttatatatattaagaaagaagaggtggaggttggggtgggagagtgaggtaagaagttattttattattatatagtttggtgagttttttaggtagatatatttattttttggtagagggtttgggataatagtttttatttttttggtattagggattggttttgtggaagataattttttttatgggtggagaaggttgtggtggggtatggtttggggatgaaattgttttattttaaattattaggtattagatttttttaaggagtacgtaatttagattttttatatgtatggtttatagtaggatttacgtttttgtgagaatttaatggtatcgttgatttgataggagttagaatttgtagtaatgtttgtttatttgtcgtttattttttgtgtgcggttcggttattaataggttatggatcggtattggtttatagtttgggggttaaggatttttggtttaggttatggatttttgatagtttcgttatgaattttatggttatgattttttagttgtgtgtttaggagagtttatttattcgttatgtgttttagtttttttttttataaaatggggatgaagatatttttaggattttttttatagggtagttgtgggaaataaagaggttagtgtgttagttatgtagttttgttattattgatatttatatttttagtttggatttgtaaatttatagattttgtgaatattagaggatttcgattttggagaagttttttaagtatgtaggtttttgggtataggagtatgtgtagggcgtgtatagatgtttagggaagggtagttaattgggtgtttgtagatgtgggtgtgaatttttcgagaattgtattttttgtttgtaatttggggaaaaggaatttgttgagtgaaagaataaatataattaataagacgtttggggagtatttgatacgattttttacgtgtacgagttttgattattataataagtacgtgtggtaggtgtgagtattagttattttgattcgcggtttttttttttggaaataggtttaagcgatgggtattaagtgttagaatgatgtttttagtttaggttttttgattttatttagattttgagggttgaagttttagattcgttttatttttggttttttgtgtatattggggaagttgagagggatatttggtttgtggtattttcgtttttttttttaaggtattaaggaaagggtatagaggtgagtgtttagagtaggtttgaaagtagttttaggaggttgtttttgagggttattggtagtgtagacgttatgggggtgtacgatcggtttagcggtattacgtatgatatttgtgtgagtttaggtatatgtagatagttatggttttagtgataatattttgtaaattgtagttggtagttgggttaagagtttttagtaaagatatttatttttttggtagataaatatattttatgttttaggttttttttttttttttttagaaattttatttagttttataaaaataattatttttgttttgtaattttttggaagttagatgaggggttgagggaggtgagtattgagttttgagttttgatttttaggttttattttatagttttatagacgtttgttggggattgggattattttgtatagtaatgggagttttatgttataggaattgagagttggtatggattagtttgaatttttagttttaattggggggaaattgaggttagagagagaagggaatatgttttaatttcggatagagtatagttttttagtttttggtttgttttttatttttttttttgcggttttaggttttatttttagggagagaggtaggggtagaaggaatttaggggttttatatgattaaggcgttttgttttgtttattttgtggggggtaggattagtttttgaggatgagggagtgaggatgcggtttgggggtagttttttagtattgagttagtttttggttttttaggggaagtggtagaaggtttagtttttatggtgataagtaagggtttagttttgtttatttttagttgtttattgagattaagtgagtaggtagagatagaggtggtatagggtgtgcgaagattattaggttaagagttgggagttttggtttcggttttcgttttttttaggattttagatgatttattttatttttggagttttatttataaatagggagagcggggtagttgagggtttttttttttttgtttattagtagttaggattgtttttgaggatttggggaggggaggagagggggagggtgtgtttgtgttagagatggaaggaatttaggggagcgttgtttttggttttttaaggaagaaggaagtaagttttttaatttgttttgagttagtttgttttaaattttgaggttgggttttttatttagataataaagaaaaattttttgaagttttgtagttttatttaattggttagaataataagtatagtttttttagagtttgagttttaagattttaagtttaggttgtttatgtttatttttcgttattttgtagtatttttatttggcgttggttttagtttagggtagtagggagtttattgtttttaggatagtagaattatttatttttagatttagtttatgtttgttttttgtaggtttggtttattgattttagttttaattttttagcgtttttttttatgatagttttgtttttgcggatattgggaggttattgttatttttttgagttttttttttttttgtagtttttattgttgtttttcgggtggttttgagttttttcggtttgtgtgagatagagggtggtagggatgatatgaggagtggggttgggttttgggtaaagttagtagattgttttttagggagatgatttcgggttggttggagtgttagtatggtagttgaaggtttgggtgttggttagatttgatttttcgtaaggtgttttttttagtaagacggttgttgaaaatagaagttttatggtttaggttgattgtttttgattaaaggaaattattgattttggttttttaagtttttatttcgggtttttgtttggtatgtttttttttttagttgatttttaagatttaatgtttttttaggaagtttttttagattgtgattgttttttattttttgtttattttttttattgattgtttatgtttgttgattcgtaattttattaagtttcgaatgtttagttttttttatagaatgttagttttttaggggttgggattttatgtcgtttgtttttttttagtttgaggtttagtataggataggttaggtggtagagatgtagtaagaggttgttgaggaataaatgaataatttttaattaataaatattattgagttttcgttttgtttaggtatttgtgtgtatttttggtgagtcgatgttttatagagtatgtgtagaaaatgtttttcgagtaaatgaattaatcgttttatttttttatttattggggagaaagtcgggtgggatatattgaaaaagggtacgtaatgacgaatgttattatttaaggttgatagtataaatagtaaaggttattgcgggagataggagagaagaaagatttagatagattttgagcgatgtttttatgtagagagtaagggatagaaggagaagtagagacgggttttataggggcggttttagaattgaaattaaggtttagaaatttagtttaggatttgttaggaattggttttatatttattttgttattatattggggtagagaagatcgttagggagtttttagtttgtttggatgttgggtaagttttttttagagttttggggtatttcgtgttggtataaggttgagtagtaatagcgtttagcgtgggtttaggttattcgttaggggttggattttttatattttttttggagtagttttttgtggattcggaaaggttttatgttgatgttttttttatgatgagtttgttttagggttgaggttatggggtttaagataatgtagttttaatttgtagttttttagttttgatttggaagtaaatttttgattatttagagttattaattaagtagtgaatttatattattgagagtaatgtttgttttacggagggtgttgtgtacgtagtgtggttattatggtatttagtgttttttaaataattttaggttagtattattgttatagattgtttttgatgaagtgggaagtatttagtttaaggttgtatttttaatcgggagttattgagttttttaatttttgttggaattttttttggggggattttcgtattattgggagttgtcgtttttagtgttgggaatttttggttgttggattttagttggagaaatgtatgaagtggaaagttttgtttcgtttttttaatttttatttatttgttttggtttaatttaatggtattattttaatttagttttatttttttaaaataggaaaatttttgagaggtttttaaaggtgattgattttttttttttttttttttttttttttttttggtcgtgatttaaagaatgattttttagagttattttagggagagggtgttggtagtatttgtatgtatagatgtatattcgagggtttgtggtataagtttgttattgtgagtgggtgtggggaatatatgtgtagttgtttgtggataggtttgtggagtgtgtatgtttgtgtggttaagcgtaggtatataagtgggatgtgtgttttcgtgggtagttgtgtgtgggtgtagattcgcgtgggtgggtgtggatatgggtggtgtgggtttgtgtggagtcgtgtataggtttatgtatatggcgttaaggggttttagttattttattttttatggttttgattatatttattttttttttaaatatttgttttgtgggggatatgtcgtttgttttgttttcgggtgagttggttttatatattttgtggcggagtgtatatatcgatgtaatttttttaaaaaaaataggttagtatgaggtttttttatgttattgaaagggtattgattaaatttattgttgtttaaacggttttgtgggggtgagggcggaggttaaagtttagttattgattacgtttttattttattttatttgatattggggtttgtttagagtttaatttgaatgtttttaatttagttttagttttaataaataatgttaaaggggtagtagtgattgggtttagattttagtatatatgtacggggtatagttgtttgtagagatagatagtgtttcggtttttaaggggttgttaatttttagtagagggtggggtggaaatggtagtttttaggttagttagtggtataggttattttgtttatttatagttattaatttaagttttgaaatgttttcgaaataaggaaagtttgagaaattgttttagattagaggaggttaaggaattatgaggattaagtgtaattaatgtgttttggggggaatgttggaatagtaaaaggatattgggggaagttagtgaaatttgaataaagtgtggagtgtagttaatagtaatatttaataaaaagtgggtaaaatattttagtagatattttatttaagaagatttatagggagtaaataagtatgaaatatgtttaattttattatttattatggaaatgtaaattaaaagtataatgagatattattatgtgtttattatagtgggaataagatttgatgatgttaagttacggcgatgtatggagtattcggaatttttatttattatagtgtaaatatttgggcggtgttttatttagttaaattaatattgattttatgatttagtaattttatttttaggtatttattttatagaaataatgatttattttaagaggagaggaatttaaatttataggtaaatgtttgtagtagttttatttagaattatttcgaaatggagatatttttaagtgttttttgataggggaatggagacgtaagttgtggtttatttaggttatggatcgattttatagtgaaaagaaagaattgttgataatgatatggatgaatttgaaaggtggttttagggtttgtaaataaagttagttttaaatttatatgaagtgtaattgtatttagttagtatatgaattttgggaaaggtaaaattacggggattttaggtaatagattattggttgttaggtgtaggaggagggggaaggtttgtttataaagggtttgtattggtgtgatggaattattttgtattttgattgtggtagtgaatatatgaatttatatatgagtgtgttaaaatttataaaagtatatattaaaaagttttttatagttgggcgtggtggtttgcgtttgtaattttagtattttgagaggtagaggcggatggtggattatttgaggttaggagtttgagattagtttggttaatacggtgaaattttatttttattaaaaatataaaaattcgtcgggtatggtggtagttatttataattttagttatttgggagggtgaggtaggagaatcgtttgaatacgggaggtgtagattatattgaattgagattatgttattgtattttagtttgggtaataagagtaaaattttattttaaaaaaaaaaaaaaaaaatttatagtatgttgtttttaaattttaaaaaatgtaattaaaaagaaaatataaaattgtgtttatatatataaaataaaaattaaattaaaagtttatatgtttttatttagaaattttatttttaggaatttatttaataaatgatggtaagtatttattagagagaacgtttattatgttatagtttaatatgtaggaaaatcgatagtaattaaaatatttaataataggggattggttaaataaaggatgatatttttataaatggaagattttttttgatagtttttattttgtacgttgtttttttttttgagatagagtttcgttttgttatttaggttggagtgtagtggttcgatttcggtttattgtaattttattttttagatttaaacgattgtcggatttcggttttttgagtagttaggattataggtatgggttattatatttcgtttatttttgtatttttagtagagacggggtttttttatgttgtttaggttggttttgaatttttggttttaaatgatttattcgttttggttttttaaagtgttgggattataggtatggattatcgcgttaatattaggtatttatttgtttttttgttttttttttgtttattgttttttttttttttttttttatggagtagggaatatatttgaatatgtgtgttttgtttattttgttgtgtaatatttagtattatagttggtatgtagtagatgtttagtaaatatttgatgaataaatgaatgagatgatgttaagaaaggatagcgttttaatatatgtaaagatgtttaatttatattaaataaattttattttgattaaaaagaggaagggagtggagtatttgtttttagaaaatattataagtttttagaagtggtaatatgggtttatgggttaattttgttttttttttttttttggggggcggggcggggttggtttgaattaattttttatttgtttttttaggaataggttgaaatatttgaaagtagtgattagaattttggatggtgtatgttttgagagcgggttgggttttgtgttgtgggattatgggaagtaagagataagtattatttggagagatttagttaaattggaattttagataaatagttaatattttaaataatataagtatattttaaatatggtataagaaatatttttattttataaattatttattatttaaatgtagatttgattgagtaatttggttttgttgtttgtttgtttgttttttgttaaatttgttaattttgtatattaggtttatgtggtatttagggtttcgaaggtaggattggtttttattagatttacggatttatacgttagttttttatttagtttgaggtttagagatttgttttcgttttgtagcgtattgtacgagtatttttaggttttcgtatttttgcgggtatttttttttttatttagtatgtttttttgttttttttgtttgtggttaattattatttttatttggatagttttttttgtaatttttgtgatttttttttcgtattataaatgtaatttatgttttatatggaagattaaaaaaaaattaagatagattaaaagaaaattatttatatatatatatatatatatatatatataaatatatatagagaaaatattattttgtaaatttttgtgtttttttttgagatggagtttcgttgttgtcgtttaggttggagtgtagtggtgtatttttggtttagtgtaattttcgttttttcggtttaagttatttttttgtcgtagttttttgagtagttgggattataggtatttagtattacgttcggttaatttttgtatttttagtagagatagggtttcgttatgttggttaggttggtttcgaatttttgattttagatgatttgtttttttgggttttttaaagtgttgggattataggcgtgagttatcgtgtttagtttataaatattttagtaaaatttaattatatttcgtatttttttttatgttgttttatatttttttattatattatttttaatggttacgtagcgagaataattattattttatttaatttatttttttttgttgggtttataggtttttatttgtttgaaattatagtaggtttgtgatttaaattttttaatatatgtatggcgatttttttaggagaagttttaagaattagaaatatgaagtttaattatttatatatttgagggtttttgagaaatacggttaagttgttttttagaaatatgtaatgtttttagttattacggtgtttttttttattttagagttaataatggttattatagtgtttttaaaatttttgttagtacgatggatgaaagtgagattttgttttttttttttttttttttattttttaattatggaatattttattttttgtttttttttgttgtgaatttttttttttgggtttttaaagtttagttaagggttatttttttttttttaggattttttttgttttttaaatattgaattttttgttttatagtatcggtttatgggtttgttttttttttagattgtgagttggttagagtgggttttttagatgtattgttggggtttgggtttcgtgtgagtaagggtttaggatatatttttggaattaatgtaaatgtttgtgtgtgtttgggttgagggagatttttttgggttttttttgtttttggtttggttggggtagttttgtaggtatagttgagggtggttagtgtgtttgtaggaaaaggttttaggttttggagttgggttttagatataggaggtttttggttttttgtatatattgtttgtgttaggaggttgttgtatggagtcggaagaagggattttttaggatgaggggggtcgaggaaattagttatagcgtagggtaggaaggattaaagatgatttcggtagttttttggttttggataaattttttgttttttgtttgtttagtttaataatattgtatgaatttttgttagggaggggtatgagaagaggagatggaggggtatagttttgtgggaagttaagattgaagaggagttttcggttttggttgtttatttagaaggttaagtatttaggttttagggtttaatttttagtaggttaagattaagattgtagttgtgtatgttggttattaggaggtattgtagttttaataaagttattggacggaaggtgatgattttggggttttagtgtttaatgaggtttttagacgtttgtttgaagatttaggttttagttgggaggatttgttatttaagtagtaatttagttttattacgcgtttgttattattttagtattataagggataaagagatggatggggcgggtcgttggttttttttgtaggggtttttttttttttagttttgggtatttttatatttttgttttattttagtttttttagaatttttatattgtggttttagtatttttattggatagacggttaaagtgaggcgtcgagagaagggatttattagtgttattagtgattgagtgatagataggttgagatttgggtttttttttattttttaagtggtttttttttggagatttatggggattttttggttttttagagagggtggcgtatagtgggtgtttaggaaattgattaatttgtaaaagtttttgttttgtaaaagttttttaggatatttttgtcgtttggtttagcggttttttatgtggttggtagatttgttattagttttttcgtgggtttttttcgaggtaggtattcgtcgaggtagggtttgttatttcgttttttattgtttcgtttttatatagaagtttttttagttttttttgtaatggtaggggtgagtggggaggattgttttttttttagtttagagatggagtgggttttttagagtttaggaacgaaaagggattaatgttgggttttcgtaaaaataaaaaataaataaataaattaaataaaattaggaattgggttttgtattttataaagtattagggtatttattatgttattagtagggttttagtttttttataatcgttaggtttttattttatagttttagaaattgaggttagagggggtaaatgttttgttaagaattaataattgttaagaaggtttaggggtggtggtttatgtttgtaattttaatattttgggaggtcgaggtgggagagttatttgattttagagttttatttagtttgggtgatagaggtagagatttgttttaaaaaaaaaagaaaagaaaagaaaagaaaataaaaaattggtaagaggtagagttgagatttgaattttatgtttggagtatgtttattgggtttttttggggtggatgttgtgggtgggattgggataggtagataggagatagggttaaggaggaagggaggaagttataggagaatggttgtttttagttgttttaagagattggtttttttgtaataatttttaaggttgtttttgattaaattgttttgttgaagattaattttattgattatttgggattttagatgtggattagtgttttgttttagggtttatatatattgaagtatttagaggtaaagaggtatatgagttatatgtttgtaatttattttttttttgtttgtttgtttttagataaagttttgttttgttgtttaggttagagtgtagtggtataattttgattaattgtaatttttgtttttcgggtttaagtgattttttatgttggttaggttggtttcgaatttttgattttaggtgatttatttttttcgattttttaaagtgttgggattataggtatgagttattgcgtttagtttgtaatttattgttaaatgatatagttgtatatcgtatgtatgtatattaatatatatataaatagagtatatgtatagagagagatatagagagagatttagagagattgaaaataatgtaaatatggtaaaatattattatttggggagttagtataaaaggtatttgggaattttttgtagtttatttataattttaagtgtaatattgtattaaaataaaaaggtttttaaaagaaaaggtatgtggattaatggaaagaaggtattttttttaggaattttttttgtgaagttggtatatgtaattatttgaataggatttggatgagtttatttggtaattttttcgttttttttttattattattattatttataattttataaggggttttgtacgttgtaataaaaattataagataaatgttaattttgggagtatatattgttttttagttttttggaagtttttattttcgtggaagttattgtgatttaattagaatatggggtttttttaagtagtttttttgagagttgtaggagattaaggttaagttattgttggaatttaaaagtttaaaaagtattttaatttttgagtttattgtaattttaattgttttatagttagtttaaatgagtaaagtttttttgtataaaaaaaagaaatggtggaaagaaagaattttaaattttgtttagtttttagtttttatggtttttttgttaaggtttgggttttttttattttttagtttgtgtttggaatttgttttttttgtttttttttttattttgtgttttgttttattgatttatttagagttttttttaggaattatggtttagtggaagagatgtatgagggataagtacggttaagtgttttagggtttttagggtaaaagttttgttttttagatacggtagggtttatagaaaggagcggttaattttggttgaaaaggtcggagaaggtttttgtaatggagtggtttttgaattgggtattgttagttaaggaaggttcggtaaggtatgttgtattttatggtaaaataagatattaagatattatttttttattttaaatagggtaaattttaaattattaagttttttagataggagttttttaattagggttgattataattatgatagtaataatgtaatgttttgtattcgtgttgttttgatttatttattattttttttgattttttttagattttatgaggttagtgttggtatttttgttttatagatgagaaaattgaggtttagtgaagatgaataatttgtttaagattatatagttaggaggggtagattggatggttttatgttaagtttattgttttttaaggtggtgatgagttatttttttaatatggaggggttaggtaggttttattttgttttaagggggtattgttgagttattggggttatttttattttaaaggattagggtaaattaagttttagggtttttatgagaagtttatgtatgatttaatatttggagattattttttgatgttttttggggtgggatgggtgttttagttttagtttgggttttaagtgtttttgttagtttttttttttaaggaggttagaagtttttcggtttttcgttttatttttaagttttattttatggcgtgggtggttggatgagattttgttttcggtaggatttattgttagagaaatagagttttttatgtttttttttattttagtaatacgttcgtagggtttagagattttattggattagattttttttttatagttaagatgcggaggtttagagtaaggttatattgtttgataatggaagggttaggatttgaattttgtattttttgtatttagttttgtggtttgtttgtttattgttttttttaagttttttaaattatgtggttttgggcgtgttttaagatattttttatttaatttttttaagtttttgttttttttttgtagtagaaagaattttgtagttttattatttttattaagatattgtaatattatttttatttagaggttggcgagatggaggagtttagattttgtacgaggtaaaatgaaatgattgagaagtttttggggtaggataggtttgggtttggtttttggttttgttatttatttgttatattgatttatttaatagtatttttggagtattagttatgtattgggtaaagttttaggtggtgaaaatataaagtttagtaaaatatagtttttttttttaaatggttcgttttagtgataggggttatggttatagtgtagggtggtgattagggtaggggtatttagtttagttttggggcgattttagatttttgtagaggaggtgttttgaagtagtaatgttgttggagaggtttgttgaagttgtgtttagttaacgttttatataagattagggaatgttagttttttttatgaaagaaatgggagtcgattaaaggagattattaaggaggtttttaagttattttgtggttttgttatagaagggtatttttggaaaagtgatttgatttttgtgtgttttagtttttttatttgtaagatgaggttgagaatatttatattttagaatggttgtgaggtttgattgaagtagagtgtaagacggtatattttttgatttatatacggtatttattttattaatgggacgttgttatgatatattaatatagttatgatttggggatgaatttggtcgtggtagttgatagttagggtaacgttgtttagtttgtaattgtgttatttttatttgtttttttttttaggtgtattttttttagtttaggtttttcgagcggtagtttttagaatgatatttatgaattataaatttttgttaaaagtagtttttagggttttttttaatgaagggtttattttatatatatataataaagattataaatggggtgaaatattggtaattgttgtaaaaattaaatgttaaatttatttggttatatagatttaaaaaaatttttaaagagtggatttacggtagtttttgtttttagattgtgtttttattaagggtaggggaggggtgttacgaggtagcgttattattcgttttgtttgttgttattgtttggtatttaagtacgtgttgaattgagttaattttaaataattgaatttttttttttttttttttttttttttggagatagggttttgttttgttgtttaggttgaagtgtagtggtgcgatttcggtttattgtaattttcgttttttgggtttaagcgatttttttgttttagtttttcgtgtagttgaggttataggtatatgtcgttatatttggttttttgtgttttagtagagatagggttttatttttgttgtttcggttggttttgaatttatgagtttaagtaattcgttcgttttagtttttcgaagtgttaggattataggtatgagttattgcgtttggttaaataattgaattttttagtttgtagaagtagtatatgattttagaaagaatgtgttgtttttattaatattaaatttttttttttttaaatgtgttttttttttaatttttatttatgtatttatttatagagacggagtttcgttttgttatttaggttggagtgtattgatgttatttcggttaattgtaatttttgttttttaggtttaagttatttttttgttttagtttttcgagtagttgggattattagtattggttattgtatttggttaatttttgtatttttagtagaggtggggttttattattttggttaggttggttttgaatttttgatttcgagatttatttttttcggttttttaaagtgttgggattataggtgtgagttatttcgtttggtttaaatatatttattttaatttagagaattatttataaattgaaaaagtaataaggtttttttttttttggatgagaaagggaaagtaatggtttaattaattataagattgttttttttttttttgttgtttaggttggagtatagtggtataattatagtttattgtagttttaattttttgggtttaagtaattttttttttttagttttttgagtagttggtattatgggtatataatattatagttggttaattaaatttttttttttttttttttttttgtagagacgaggtgttattatgttgtttaggttggttttaaatttttggatttaagtaattgttttattttagttttttaaagtgttggaatataggtatgagttattatgtttagttttagtttgtattttaggaaagttattaatttttttaaagttgataagaatgggaaagattttttaatatttgttttttaaaaaatttatatttataattataaaatagttaataatttaaaatatttaaaggataattatatttaaaagttttggttggtgtttttgtataaatgattgggatttggagtagatgggtttttaggattttgtttattatatatagtaaggataaaatataaataattaatgttttagtatttataattaatatgttagttaaaaatggtttttttggtttcgtatggtagtttatgtttgtaattttagtattttgggaagttaacgtgggtagattgtttgagtttaggagtttgagattagtttgggtaatatagtaagatttttatttttataaaaaaaatttttaaattagttgggcgtggtggtataagtttgtagttttagttatttaggaggttgaagtaggagaattgtttgagtttaggaggttgtggttgtagtgggttatgatttagttattgaattttagtttgggtgatagtgagattttgtttgagagaaggaaggaaggaaggaaggaaggaaggaaggaaggaaggaaggaaggaaggaaggaaggaaggaaggaagtaggtaggtagggagggagggagggagggagggaaggaaggaagaaaatggtttttttattgatttttgtttatttgaataaaataaaaaatttaaaaaagttttttttttaaaatgtatgatgtggttaggtgtagtgttttatatttgtaattttagtattttgggaggttgaggtgggcggattatttgaggttaggagttcgagattagtttggttaatatggtaaaattttattttaaaaaaagaaaaaaaaatatatatataatgtatggtgtgttttttttattaagtaaattttaatttatagcgaacgtgagataaatatattttttttttatttgttattattttttggtaggatggattttttgtaacgggatagattttttgagaggatattttgtgtagtataaaattgggttttgtggaatttttttttatggggttaaattttgggggatgtattaatatagtagagtttgggtatatatattttttgaggaggtttggtttttattgtttatttgttatatggtataagtaatatttttaaattggttttttgtttttggtttcgttaatattgggttagtgaggaggttattattcgttttgtttagaagggtttgttttttttttttttatttataggagttgtttttatatattatatgggggttttgggttgggttggtttggtttttaggatggttttggagggaggagggagtggtgtttgggcggttaggggatatggttattattttagtagatgggcgaagatggtgtagtttacgtataatatgtagtgtgttgaaaattttttttagtgtattttttttatcgtttatagagtttttatatgttggttaagtttgatgggtatataggtatgagggtatttaggtagtgggtatgagttttttgggtaggggaggaaaaaggttttttggttttaggagatttgggtttaatttatagcgggatagttttattttttttatttttaaattgaggatattaatattttttagtgggtttttataaaaagttttagtttaggtgtggttaagggtaatgtttattaggtgtttttttaattgtagatggggtttaggaagttggggtttaggaagggtgtagaggttgtttgatattttttgagttcgattttttgtgtttagttttgtgttgattagagaggaatatagtagaatttttgttttggggataggttgaagttttgggttaaataaatatagaaaatatatttagtagggagagagttattttttagtttatgatatatgtgtacgaggtgtagtagtttatggggaggaggggtttgaggggtttgggtggtttttgtttttttttgaagtttgttttcgttgcgttaggtagagatggtagttttcgttttttttattatttatttatgttttaaaagataatgttaattatatagtaattatagatttagtaataatttttttattttttaattttatgtattttagttaattttaattgtttgttaaggttttcggttagtttgatagagttaaggttttagtaaaattttattaattataatagttaatattgattgagtatttattatgttttaggaattgttttaagatttttatttatttatttatttatttatttatttatttatttatttagagatagagtttcgttttttttgtttaggttggagtgtaatggtgtggtttcggtttattgtaatttttgttttttgggtttaagtgatttttttgttttagtttttttagtagttgggattataggcgtttattattacgtttagttaattttttgtatttttagtagagatagggttttattatgttggttaggttggttttaaatttttgattttaggtaatttatttgtttcggttttttaaagtgttgggattatagatgtgagtaattatatttggttttgtttttgtttattttattttatttaagttttattttattattaataggtagatatgatttttatttttattttataggtaaagaaattgaggtaaagaggttaattaatttgtttaaggttatttagttatgtgggttgaaatttgtttttaggttttgagttttatgggtttttttaaattaaaggtatttgaagtattaagtagtttgtgtagtataattgtggaatgaatagtttttatgattttttaagaattttagaaattatgttttagggtatatggttggaagattaggtttaagtaggtttttgtttagttatttaggtcggggaagtttttaggaaggggagtcggggatagttatttttttgtagttgtgttttttttggattttgttgtttagtttttggagttttagtttttggttgtgttatttattggatggtttagggtaggggatagggagttgtaagtgttttttttgggaatttaatagaaaatttttaaaatatgtatggggttaatagtatggagttattggatgttttttttttggagtttttttaagtttcgttggaaggattttggaattattttaataaaggaagtggttttagatgtgcgtattttaggaggtgggtgtatagatttttagagtataaaagaatttttttaaaggttacgtttttatgggatggttaattgaaggggtagaggggttttcgaatatttaggggtttagttagggttaagattgtggttttagagttttcgtttttggttttgttttttatttttttttattagttttaggtttcggaaaataaatgtgtttttgagttgaatttttgtgatttgttggttattggtttgtaggtaaggagatgaacggatggtttataagggtttttgtatattttgtaattttggattttatattagaagattatttaggggttagatagataaatgtaatagaatagagattagatgtaaatttttaaatatatgcgtaattgatttttaataaaggttttaagatcggtcgatgagaaaagggttattttttttataaatggtgttgggaaaagtggatatttttataaggaagaatgaagttggagagttttatgttacgttatatttaaaattaaagttattaaagatttaaatttaagagttaaattataaagtttttaaaagaagatataggcgaaaatttttttgatattggagttattgacgattttttgaatatgatattaaaagtatagataataaaataaagaaattgaaaaattgtatttttttattaaaatgtaaaatttttgtgtattaaaggatagtatttagggagtgaaaggataatttatagaatgagaagaaatattcgtaaattatgtatttgaaaaggaattaatatttagaatttttatgattgaagaataaggaaataaataattttatttaaaaatgggtaaagtatttgaatatatttttttaaaggagatatataaatggttagacgttaaaggagaatattgtatgattttatttataagaggtatttaaggttaggtgcggtggtttatatttgtaattttagtattttgggaggttgaggcgggtggattatttgaggttaggagtttaagattagtttggttaatgtggtaaaattttatttttattaaaaatataaaaattaggtaggtgtggtggtgggtgtttgtaattttagttatttgggaggttgaggtaagagaatcgtttgaattcgggaggtggagattgtagtgagttgagattgtattattttattttagtttgggtaataagagtgaaattttgttttaaaaaaaaaaaaaaaaaaaaaaggtatttatagtaggaaaatttatagagagagagtagaatagaggttatttgggtggggggttaagggtgtgatggcggttttcgtttaataggtatggagtttttgtttgggatgatgaaaaagttttggaaatagtggtgatggttatataatattgtgggtgtatttaatgttattgaaaggtttatttgtagatgttaaagtggtagtattttatgttatgtatattttattataataaaaagtttatttttaattaaaataaagattttgaatgtaaaaagtaaaggttatattgaattatgtaaagaatatttagtttggggttttattgttttgtttagagttttttagtggtttttttaaagtttgaattttttggtagaaaataaatggtttaggggttaggcgcggtggtttatgtttgtaattttagtaatttgggaggttgaggcgggaggattatttgagtttaggagtttaagattagtttgggtagtatggagaaattttgtttttattaaaaatataaaagttaattgggcgtggtgacgagtttgtagttttagttatttgggaggttgaggtgggaggattatttaagtttgggaggtagaggttgtagtgagttgagattgcgttattgtattttagtttgggtgatcgagtgagattttgttttaaaaaataataaaataaaataaaataaaataaaaagttttttttagttgtgtttttgttattttttagtttattttatcggtatgtattatgtttttgtattttatatatttgttttatgttttttttttattcgaagatttagtttgtgttgttttttgagtttagagggttttttttattttttttagttggtgagtttttatttaatttttaaggtttatttcgaatgtttatgtttaggaagttttaatttatttattttttttggggatttttatggtatgtagtatattttaattaggttatgggttttttgagggtaggagttagtttatttattgttaaatattttggtttttgtttgatatagaagtgttaggttgaaggatttgttggatgtaaggaggagtttttgttaggcgtatatttttttatgtattttttttgagttgttttttttttttgaattttggtttttatttgtaaaatggagatttaatttttttatttaggtttttggtgagatttaggggattatggatgtttaagtgtttttagattgtatatgtcggggtgggacgggtggacggaattatgggtgtgttgggaagagtttaggttttggagtcggatgttttgttgggaattcgggtgaggttagatggtattttggttagaagagagggttgtattttttgtaggtgagttttagaattttagggtggaggatgagtgaatgggggattaagggaggaattttagtagtttttaggtagtattttgggtaggtggtaggaatgggggtgttagcgggtaggatacggaatttattgtagggaatgggggagatttgaggaggagagttggggatgaagggagaaaattatttggttagagtcgatttcgggggttgtggtagttagatcgtaggtttgtggttagtggggtgagatttaaaagaggagtagtgaggaaaaggggtattttttcgattgttagagttggagaagattaagatttgtgttaaatagagttatttagagtttcgttgtttttatattttataggaaattttgtaaaaaaaaaaaaattaataattttttattagaatgtaagagaacgataaagtaggtttttattttaggtttttatttaaaggaaggatgaacgaagagagagtggaaagatttatagagtttttagtatgttttttttttgtaagatttttttatttatttatttagtaatagatatttattgagtatttattatatagattagttttaggttttggggaaagttggaattaaaatagataaagttttttgcggttttttatgttttttagagggtattgtttttatagatgttttttagttttattttattttgattagaggtttttttatgtttttgaaatttttggaaatttatgtagttattttttatattagttatgaggttttatgttatgtttgggatattgtttttatttggtataggtgaggaagttgtgtttaaggttatagagttaggtgtagaattttaatttgataggtgtcgaaatttatttttgatattatttgttttttgtattttcggttgtgaagttgagaagaacgttttgggggttatggtttttttttttttttttttttttgtgagatggattttgttttgttatttaggttggagtgtagtggtaggatttcggtttattgtaagtttcgtttttcgggtttatattatttttttgttttagttttttaagtagttgggattataggcgttcgttattacgttcggttaattttttgtatttttggtagagatagggttttatcgtgttagttaggatggttttaattttttgattttgtgattcgttcgtttaggttttttaaaatgttgggattacgggtatgagttattgtatcgtgttttgggggttatgtttgtaagattttgttttttatttttatattatttgggatggaattagggttattttaagtttaattaggattattttagaataggatgttttttaggttttttggagttttcggttagtaagattcgattttttttttttggttgttttattgtggacgagttatttattttttatgaattttagtttttatttacgaaatggggatgataatagtattaattttataggattgtgatggtgattaagtgaaattatgtataagtagtattggtgtattgtttggcgtataggtagggacgtttagttgttttgggttgttttatggttttgtagtagtagttaattttaagttttttttgttttaaaatttattattgtttttgttttgtagatgggaaaatttaggttaggagttaggtttggtattttagatttttaatttttggtagattggattagtttttttttttttttggtataatgaatggggaagagtgtggggttttgaggtattttgaggattttggagggttaatttattttttttggtgaatattatagaattttaaggtttttgaaattattgagttttatgaagaaggtttagagatggggaggttgaggttataataggggagttatgtagtagagttatgtgtatgtttgttttttttatttgaaagtgagttttttttttgaagttagaggttatggagttggagttgttttatttttatgttgggatgtgagttaggtgtgaatggatttttgtggttatatagagatatcggggaggtttatatatttaggaggattttaaattttatatatatattttaaaatttgattagaattttattattattatttgtaatattttagtatttttaaagggtatagtgtgaggggtggggtagagaatttggtggtgtaggatgtacggggtagatatattatttttttttattattatattttttttatattttttttttaggtgggatagggttaaagtgttatttaatatagggagaaatggagtggtattagagaagtaagggggttgttatatatgattatttttatagaaaaattaagagaaagtatggagggagaaaaggagaaagttaagagagaagaagttttaggatttttagttattagagaaaatttattggtttggataaattttaattttttttaatttttttgtattttttttttaagtggtttttagtaagttattaaattttggtggcgtttgtacgttttagggtaagttagtttgattttttttttagagtttgagttagggttttttttattttagggtttattttattgaattggaattttaaggttatttgtttgtttttgtttttggatttgaaggtaggggttgtatttagagttttttagaatattttataaggtttggtatagtgataggtaaagtttggtgagttttgcgtaaatggaattaagttttttagttttttttgtttgtgaaataagatatgtgggttaggagatgattgttattttttttaattttgagtgagattttttaatatgttattatgatttattgtgtgtgtgttgtagggttaggggaggtattagttttttcgatgtaattaaaggtttttagggtttggtggatagttttatatagtgggaggagttggttatttggttttagttgattttggtttgtggtttttaagaatttaggaaaagaaaatttagtttggggagttgggtagagagtaggagttttagtttggtggggttgtattagagttaggtttttgtaattttattagggattttacgggtgtttttttgttgttttttaatgtttaggagtttatggcggggtttgttttatttttaaggagattgaggtagaattgtaagtatttgttttatttgatgtatagagagagtgtaatttattggatttattgtaggagtcgtatttaataagagagcgggtgagtggattggattttttaatattttttgtttttttatttattgtagtggaaggaggagaattcggtgggtttttgtttttttattaatttggttgtgggggtttatttttttttgggttttagtttgtttatgtgttaaatggggttagtagtgggtatagatagtgttaaggatacgtttttttcgtagtgagttatacgggatagagggtatattttagagttggtggtttgttagacggtttcgtcgtagtgtgggtgggttggatggattatgttcgagggttttaggatgacgcggggggtggttgggttttatcggggatttgttatagggagattttgtttgttattcggtgagttagttgtttttgggagttatgattaggggtaggaaggttataggttatgatgtaagggcgtttagttattttttttgggggcgtttttggaggtagaggttatgttatttatagatttagagaagttttagagtcgtgtatacgggtatttatttttgtatatttgaggttcgtatattgggggatatagatataagtgttagaggatagatatgttttttatcggattatatataaattttcggtttcgttttgaaatatttagatagtaggacgtggatttagagagaatgggtacggtatatatcgtttatatttatgttgtgtatacgtttatataaatatttaagttggtttttgggtgtatttaattatgtgggggtaatattgtaggagatattagttttttatttatttttttagttagcgaatatttgttaagtttaattgtataaaatatttggaaggatataagtcgtaatataggaggtagggatttggtatgttttattttttaggagaaggttcgtttagggaaggtgttttataaatattgggatagggaagatgagtggatataggggttatgagttcggggttttagtttgagtttggttataaagatatttgtttattttttttttatttgtattttagttttgagtttagaatttgtattttattatggttttgtaggatttttagtcggttttgtgttttgtgatggttttttatttaggatttgtgttagtttttagggaagttttttttatttattttattttagttttttttggataaaaatgcgtgtgggggtgaggagggaagataaagggggtgaaggtgggtttagattgttattagtatagaaattttaagagggtttttggaaattgttaatatttttgtattttatatagttaaaatttagatttcggagtagaatatatttttttaaggttatggaggagtagagaatgtaaaggtggaggttggggtgatttatatcgtaattgtgggtttcggtttttacgtgtgtcgcgttggatattagtgttatggtttaaattttttatagttttttagttttttttgttgtggtttttagagttttggagagttagttgttttgttttgatttgggttattaggttttgtttttttacgaggtgcgtggggttaatatttatgttgggtttttagtttagaatgaaaatttatttttaaagaatttgttttaagaattcgatgaagtaagtattggttttttttttgtttttaatgtgtagcggcgttagtgtttagtagttttgattaagcggtttcgagtataagcggcgtttttatcgggaaagataggtatttggtagtcggtggttttttttatttcgttcgtattttttagtgattttttttttattaaaacggtattttgggagtcgcggagcgttacggtgatttttttaattgtttttggagtttaaattcgaatcggttcgcggttttgagtattattttatatattttagttttggttttttagagttttgtttttgcgtggttttttttcgtcgttgagttataatttttttttattttttttttttttcggcgttggttggtgcgggttggggttaggtggagaagtcgttttttgttaaggtgatagaacgtgttgggggtgggggtcggggttagggtcggtgtaattagggggtcgttgtttttttttggatatagtggaagtttttttcgtattattaaatttttgttattttttttgagggatttgtttttaggtagtacgtaagttgttgtttcgggtttatttcgtatttttttattgggtgaggaaggagtattttgaatggagatgggggtgttttcggtttatatatttgtagagaagaggtgtgtcgggttgtatttttggaggtcgcggtaattgatattagagaagatttcggttgtagttgggaaggtttattggttggaaagaggtgttttttttttttagtaaagggttttgtttggaagggttgttttttatttgtttagtggtattataggacggtcggtttttattcgaattttttcggacggtattattatatagtcgggttttcgtagtgttggttttttaattcgatgattgttatttcggtgaggatttgtgttgatggtcggagaattttgcgttgcgggcgtatatggttaggtggcgtttggtaggcgacgttcgggtgtaggacggcgtttttatcgttttattttaaatcgttgtttgggtttaggtttttcggttttttgaataggggtttggggggttaaggacgttgaggtttcgggggtaggaagttttttttggttaagcgttttttttttttttcggtatatatttttttatttatttatttcgtttattttcggggcgagaggtttattaaggtagggcgcgttttttttatgaattattttaaggtttttgagtcgcgggggtttcgggtaattatttttttttttttttggttttaggtattttagtttaggggtttgtagagaagttcgaagttcggataaacgcgtcggacgttaataattttttatttttggtagtagtaaaggttaatatatttttattttttattttagtttgttattaaaataaagttgcgcgcggttgagggtaggaaggcgttgagatcgagaagaagggacgtttcggagaaagtgcgtttagttgattttagaaattagagtttttcgggatttcgtcgagattttttgtagggcgttttaatttgtttttttattgcgtgtcggcgtcgtagcgcgtgcggtttagggtttggtgatttcggtttagttcggcggtcgcggcgaggtttttggcgtagtcgtttggaatttcgtattagaatcgggatcgcgtaaatgttttggttgaagtgttattttatttaagaaatattgttgttaggaataaaatggggttttcggtgtttcgaagtattttttgaaatttttttaaaataatttataaaaaatgtttttgttttaacgttttataacgtttaaggaaatatgtaaatggtttgtttttttatcgagatggtcgttttaattaatagtgtatatatatataataatttttttaatttttttttttagagttaagtattttattatatgtaaattataataaagaaaagattgtgtaagattatgtaagtcgattgatttaaaatattgagttttaatttaggttttttgtttttttatttaataatttttgtgtttggattagattggtgaagtaggttatggaaattaataaagtaaaaaattaaaagtattttttttcgttatttttttttttaaaattaaataatagtcgtttttttttgagtaggttttagttttaggttcgagtttttttgcgattattttatagttatttatagtagttgttgttgtttttgtcgggttttcgtttttgttttttttgggtcgttttttgtatataaaatatattttagttttttaattaaatttaaatacgatttcggtagaatttatatatttcgtggtgtatggattgtgtcggtgtaggggaaataaatattttttggtatttaattattgagtttaattcgaaaaatcgggattgggtttttaggcggtattttaggggttttaatttggttcgcgtttttttagattttggcgttgagagcgttgtttttgcgggtgggtggacggagaggtaataatttgtttttaataaaaatttgtcgttatcgaatcgaaagcgaaagggaagggagaagaggggtagtttttcgtagcggtttcgcgtttcgggataggtagattaggattagtacgcgtcggttgtagtttcggcggtcggattcggagtttgggggcgaggcgtcggagtttttgttttgagtatagggaggttttttgcgtcgttgagaaacgtcggatttttaattcgatatgttttttgtggtttaggcggttcgttttggattcgggtaaggaatttaggaggttaaagagcggatttagagtttggaggggagaatggtgaagttttgggttgtaatagaagagggttcggtgggggttttttcgtaaaaacgcggttttcgtatttaaaggatattgcggagtcgttttaatcgtcgtttttttagtatatttggggaaaggaaggtttaagttggggtagggacgtttgtagttcgggagggttttttttattaatttttttcgtaattcggtttagattcggttagtagagattggaggcggttttttcgtttcgtattttttcggtttggtttaggtttagttgttcggggtattttttttgtcgagaggtaattggattttgtcgggagtgggtttagaagttgaggtttaggaagaggttttcgagttttttttttttgttaggtgtagttatatacgtgaaagaatagttttcgtttcgatttttagggttaggaatggttgttaggttttagttgtttgtttgaagacggagattagttagcgttagtattggtattaaggtcgtttttgttttcgatttttttaatgtttttgggagcgtttaaggatttttttttgaattttattttttcgtttttgagtatatatatttttataattgtgggagagaatcgttgttaatgtatgttttagtttttttgtttgttggtagggtagggattttattttagagtttttttttttggttatttttgttaagggtagagttttattttttgtatttttagtttttttattttagatttaacgcgtttaattttttttttagaaggattagatattttttggttggggagatttagttgttgagagagggaaagaataaatattgatttgttgtttattgtttgtggttttgtttcgagtagtgtttttattttaggtagtatggagtggcgttttgtcggtagttataggttgtttttggttttagtttgtagtttatgatttagagtagtggtagggatttgttttgtttttagaattgggtgttttcgagtttttagcggttcggagatagatagggatggaaatgtgggtgggggttgggaggggtaggggtagcgggggtttttgtttttgttttttgttgtttttgtagaggtatatttatgatttagtaaggtttttttgttattattttaggatgtagatgaggaaatcggggtttgggaaggtgtttgttgttaggttatattgttacgggttaggggtagtagcgggttaagtggttggtttttttcgttagttttaaaggttagtgtaagtagaggaagggttaggttggttgtgggggtttagtaggatatagagagagggtttaggggaggttaggttttttcgttttttttttggatttgaaggtatttaattaagaggtggggagttttttaggttttttttttgtttaatgtattagtttttttagaggttttattggtaatttttattaaaatatgaaaatttaatgtagtggagagagagtatgagttttttggttatgtaggatgaatttttatgggttttttagtttgcgatttgtttttatttaatagttttgaatgatagggacgagttggggtttgtatttttgggttgggaaggatagttagtacggatagggttgagagtttttgttggtttagtacggaaagagtgtttgtatgagagttgtgtgtgtttatgtgcggagttgtgtgtgtttgtgtgtggagttgtgtgtgtttatgtgtggagttgtgtgtgttcgtgtgtggagttgtgggtgttcgtgtgtggagttgtgggtgtttgtgtgtggagtagtgggtgtttgtgtgtggaattgtgtgtgtttgtatgtggagttgtgggtgtttgtgtgtggagttttgggggtttgtgatttgaatgtttgattttattttaattggaggtgaagaggaaggtggaggaagtggggaagggttattgaatttttttaaatttttttttagttttgttttatgggtttgggagtatgtggtttattcgaggttatatgggtatgtgtttttggggtatgattatatcggtttttaaagaagatgttttttgcgtgtgtgtgtgtagagtgtaattgtagataagtatatgattgtgaatgtttgttagtagttatttatgaattagttttgcgtttgtgaaagaaggaatttgaatacgagaaaatatttgttatcggttgtttttttaaagttattttagttattaaggttttcgtcgtgttttagtttttgtttttaggtttagtgtttttttattagtttggattagggtaaattttttgtttttaattttttttattagggtcggatttgaaggttaaggttttcgggtatgtgtttaggatttttggtttagagaaggtttttttttttttgcgtttttgttttttttttcgttttggggtttaggaatttcgattttttggaagaagagaaggtttaggttattgagttgttttggttagagacgtttttgagtgtttttttttttcgggtaatggtggttgtgttttggggggtttaggtttgttttttgtggttgcgtttaaggtagtttggaggttatttaggttagttttttcgggtttttcgtgggtttaaattaggatttagattttttttttttgttatagttttgggttatttgggattcgggattttttgtttttttttttattttgttttaaattattgtttagaggtttgtcgtttttaagaatcgtcgagggagaagttttaggggaattggtttgttcgtatttttattgttagtagcgtttagggttttaggattcgggttttgttagattatagtgttttttgggattttagggtttttggtttcgtattgtgttgcgttagtgcgtttggatttttcgtgagttttcggttaattacgtttcgggtttttcgtttggtttcgtatttgcggcgtttttatttgcggcggcgtcgttcgaggagttttttagtcggcgaggagcgaggtttttgtagttttgttgtttcgtagtttcgtagtttcgtagtttcgtagtttcgtagtttcgtagtttcgtagtttcgtagtttcgtagtttagcgttagagcgttgcgcggagattttttgtcgtcgtacgttttgggtcggtaagaagtattcgttttaaatttcgtttagcgggtagcgtaaagcgagcggtttggggaaatgtcgaagggatcgggaaaaataaattttaagtcgagtttaatagtcgaaacgtttcgtgtttaggtcggcggataagaaggagatagaatagattttttggttttttcgtagcgatcgatttcgtttatcgattagagttattatttcgtttttagttcgttaatttatatttttcgtaagttattagttttaagggatgcggaagttaagtatttcgtggtttttagtattaggtgattcgtacgtgtatttatcgtagtagggaatttgtaaggtcgcgttgtggtcgttgttgtttttttggagtttgaggttgtcgttcgggggcgttttgtaggcgtttcgttgtaagtaaagatgcggttgcgcgggcggttggggttgcggttgttgttgttgcggttgcggttgcggcggcggttggggttgcggggtcgacggttggggttggaatttgttaaaggagtttcgcgttttagttttattttttaggggtgtcgttaggttttgttgtttagcgtcgtaacgggttcggtttttggcgttttcgaatttttgtgttttggcggcggtcgataggaaagttgtgtcgaatttgtcgttttcgggaaatgttttaaaaggcgacgagttttttcgattttgcgatatcgggttgtagtaggcgtttatggtagcggtcggcgattcgtagtaagagacgtaagttttagtatttatgtttggtttgcgtaggcggcgggcggggacgcgagcgagggcgcgaggacgttatcgcgcgttttggttgggagtttggggaggcgaggaggttgtggttgtgtattttttgttcggtttgttcgttttttttttttttttttacgtcggttttttttttttttttttttttttttttttgttttttttttttttttttttttttttttttttttttttttttttttttttttttttttttttttttttttttttttttttttttttttttatagttagtcgagggaaagaacggagggtagtaaaaagatttagatgtttcggaaagttgattagattttttaaatttttttaaggttttgtagcggaaaaaaaaaataagtaaatttttttttttgttttgtttttttttttttttttttttcgttttttttttttttttttttttattggtttttgtttttttttttttatttttaaggagatgttattaattcgttagcggggatttaattcggaggcgttcgagggttttttcgattttaggcggggttggggagatgttaggatttttagggttttcgaggttaggttgagaattggcggggtgtcggagttttgttttagggtaaagggaaatgtaaattttaatgataggttaaaaaaaagttttttaaaataaatttaataggttttgatattcgaagttagggggattacgggtttgcggatgtaagcgagttttacggatttttgcgcgcgagttcgcgggcgtcgttgcgggttttttcgttggtatttttttttaggtttttaatttttttttttattttcgtttttacgggagattaatatatatataagttttcgtcgtttagtgtatggttatttgtacgttttgttaattatttttttttgttgtaagggcgttgggttgggatgtagcggaatttgtgtttttttaagttttggagaagttttgggttgggttcggttttagaagttttagagcgttgttttttgcgttttcgtttagaggtcgtatcgtttacgttttacgtttgcgtttaggcgaggggattttttgttaggcgaagtatagagagcggattttggagattttttgattttgttcgatagtcgcgttgttatttgtttattttttggggttaggggtcggggagaggggtgagatcgttttttttttttttggttttattgttttcgattgtaaaacgaattgtttggttttgataggttgtggttttattattattgcgagttttaaggtttttggtatcgttatagtaagggaaaaaattttgcgcgtgtagtttttcgatttcgttttatgataatcgtgttagagattggcgtttttaattttttgatgagttaacggaggtttagagaggggcggttatttggtttaggttatatagttgggaaatagtcgtcgcgttttggaatttttgtttaggttagtttttttatcgatttggaaggtcgtgcggatagcgtagatgtagaggggaaattggttttcggttgtggaatggtttaagttgaaggagattagcgagagtagttttttttaaatcgttgagaaaatcgttaagcgagaacgtatttttagggagtttgggagtagggtgagaggtaaaagtgtaaggtaaaattaaagagggtttgagtatcgtgaattaaggaatgtgggttagatgttaattttttgtatttaaggttttttaaagaaaaaatatatttggggggtcgcgtttttgtttttaattttatttgggttaatttttatttttattttatttttttagtatttttggtttttgtttcgtcgtcgatcgcgcgattttatatttggtttttatcgtcggtttattttgaagtgttcgttaataaagatatttcgtaaattaagttaggagcgcgtaggttttagtcgttttttattttatgtttaatgggaatcgcgttttattggttcgtagatttaagttatttgagagttttttatttattgagtttttgttgtgttaataatttggtaatataaggtttattatatttattttgtatatgggtagattgagatttaattaaaataattttttagttagtaaaaagcggagtgtttttgttattattttaaatgtttttgtttagcggtttttttaagtttttagaatttgttaaggtttttagtttgtgtattgtagtataggtggttttttttatttggaattttttaaatttatttttgtatttttgtttggttaatgatttagagtttagtttagagtatttttttttaggaagatttttcgttttttttagtttaagttgacgttttcgtttgttttattttcgttttagatttcgtggttgtttggttgtttggttatgagtgtattttaattttattagttgttttagggtagttttttacgtgtttggtattttataaatatttgtggaataaaagattaaatttggattaggcgcggtggtttatatttgtaattttagtattttaggaggttaaggaggatggattataaggttaggagatcgatattattttggttaatacggtgaaattttgtttttattaaaaatataaaaattagttagacgtgatggtagacgtatgtagttttagttatttgggaggttgaggtaggagaatggcgtgaattagggaggtagagtttgtagtgagtcgagtttgtgttattgtattttagtatgggcgatagggcgatagggtgagatttcgttttaaaaaaaaaaataaataaataaaaataaaataaaataaagattaaatttggggttgtaggattttattattttagtgtattttaattgtttagtgtagtattaagttttgagattttttttttggttttttttagttaaggatagttggttatttatttattttttttttaaaaattaagtagcggaattaatagcgtgttggattttt

SEQ ID NO: 4 - DNA, 52626 bp, Artificial Sequence
  chemically treated genomic DNA (Homo sapiens)
gaaggtttagtacgttgttaatttcgttatttgatttttgaagagggggtgggtgggtgattagttgtttttgattaagggaaattaaagaaagagttttagaatttggtgttgtattgagtagttggaatatattgaggtgatagagttttatagttttaggtttaatttttattttattttatttttatttatttatttttttttttgagacggagttttattttgtcgttttgtcgtttatgttggagtgtagtggtataaattcggtttattgtaagttttgtttttttggtttacgttatttttttgttttagttttttaagtagttgggattatatgcgtttgttattacgtttggttaatttttgtatttttagtagagatagggttttatcgtgttagttaggatggtgtcgattttttgattttgtgatttattttttttggttttttaaagtgttgggattataggtgtgagttatcgcgtttggtttaggtttaattttttattttataaatatttgtggggtgttaggtacgtaggaggttgttttggggtaattagtggggttgagatatatttatagttaggtaattagataattacgagatttgggacggagatgaggtaaacggaagcgttaatttaaattaggagagacgggaagtttttttagaggaagatgttttaggttgaattttgaattattagttagataaaagtgtaggaatgagtttagggaattttaggtaggggaaattatttatgttatagtgtataggttagagattttggtaggttttaggaatttgaagaaatcgttggataggagtatttaggatgatggtaggagtatttcgttttttgttaattggaaaattattttggttgagttttagtttatttatatgtaaaatgggtatgataagttttgtattgttagattgttggtataataggagtttaataaataaaggatttttaagtggtttaggtttgcgggttagtgaggcgcggtttttattgggtatggagtggggggcggttggagtttgcgcgtttttggtttggtttgcggaatatttttattaacgagtattttaaggtaagtcggcgatggaaattagatgtgggatcgcgcggtcggcggcggagtaaggattagagatattaagggggtagggtgggggtaagaattagtttagatgagattgggagtagaagcgcgattttttaggtatattttttttttgggagattttagatgtagaaagttgatatttgatttatattttttggtttacggtgtttaggttttttttaattttattttgtatttttattttttattttatttttagattttttagaggtacgttttcgtttaacgatttttttagcggtttaaggaaggttgttttcgttggttttttttaatttgaattattttatagtcgggggttagttttttttttgtatttacgttgttcgtacggttttttaggtcggtggagggattagtttgagtagaggttttagggcgcgacggttattttttagttgtgtgatttggattaggtggtcgtttttttttgagttttcgttagtttattagaaaattgggggcgttaatttttagtacggttgttatgaagcgaaatcgaggggttgtacgcgtaaagtttttttttttgttgtggcggtgttaggggttttgaggttcgtagtggtggtgaaattataatttattaaaattaagtagttcgttttatagtcgggggtagtgaggttagaaagggaagagacggttttattttttttttcgatttttgattttaaggagtgaataggtgatagcgcgattatcgggtaaggttagggggtttttagagttcgttttttgtatttcgtttggtaggaaattttttcgtttgggcgtagacgtggggcgtgaacggtgcggtttttagacgggagcgtagagggtagcgttttaaagtttttgaagtcgggtttagtttagggtttttttagggtttgagggagtatagatttcgttatattttagtttagcgtttttatagtagagggaaatagttaataagacgtgtaagtgattatgtattggacgacgaaggtttgtgtgtgtgttaatttttcgtaggaacgggaatggggaggaaggttggaaatttaggaaaaggtgttagcgggaaggttcgtagcggcgttcgcgagttcgcgcgtaggagttcgtaggattcgtttgtattcgtaggttcgtggtttttttggtttcgaatgttaaaatttgttaggtttattttggggggtttttttttaatttgttattaaaatttgtatttttttttgttttaaggtaaagtttcgatatttcgttaatttttagtttagtttcgggagttttggggattttggtatttttttagtttcgtttagaatcggaaaagttttcgggcgttttcgggttgaattttcgttagcgagttagtagtatttttttaagagtggagaggagggggtaggggttagtggaaggagagaggaggaggggacgagagagggggaaaggaagaagtaaggtagggaaaaaaatttatttatttttttttttcgttgtaaaattttaagagggtttgggagatttggttaatttttcgaaatatttgaatttttttattgtttttcgttttttttttcggttagttgtggggagggaggaaagagagagagggagagagagaggaagggggggggagggaggggaagagagagagaggagggagagagaggagagagatagagaaagaagagggggagagagagagaggtcggcgtggaggggaggagggagagcgagtaggtcgggtaaggagtgtatagttatagttttttcgtttttttaaatttttagttaaggcgcgcggtggcgttttcgcgttttcgttcgcgttttcgttcgtcgtttgcgtaagttaggtatgaatgttgagatttgcgttttttattgcgagtcgtcggtcgttgttatggacgtttattatagttcggtgtcgtagagtcgggagggttcgtcgttttttagggtatttttcggaggcgataagttcggtataatttttttgtcggtcgtcgttaaagtatagggattcggggacgttaagagtcgggttcgttacggcgttgggtagtaggatttggcgatatttttggagagtggagttggggcgcggggtttttttaataagttttagttttagtcgtcgatttcgtagttttagtcgtcgtcgtagtcgtagtcgtagtagtagtagtcgtagttttagtcgttcgcgtaatcgtatttttatttgtagcgaggcgtttgtaagacgttttcggacggtagttttaaattttaggaaggtagtagcggttatagcgcggttttgtaggttttttgttacggtgagtgtacgtgcgggttatttggtgttggggattacggggtgtttggttttcgtattttttgaaattggtggtttgcgggaggtatgagttggcgggttgggggcggggtggtgattttggtcggtaaacgggatcgatcgttgcgagggagttaagggatttgttttgttttttttttgttcgtcggtttaggtacggagcgtttcggttgttaaattcgatttggagtttgtttttttcggttttttcggtatttttttaaatcgttcgttttgcgttgttcgttgggcgggatttgaagcggatgttttttatcggtttagggcgtgcggcggtaaggagttttcgcgtagcgttttggcgttgggttgcggggttgcggggttgcggggttgcggggttgcggggttgcgaggttgcggggttgcggggttgcgggatagtaggattgtagaagtttcgtttttcgtcggttgggaggtttttcgggcggcgtcgtcgtaggtgagagcgtcgtaggtgcggagttaggcgggaagttcggagcgtggttggtcgaaagtttacgggaaatttaggcgtattggcgtaatatagtgcggagttagagattttagggttttaggggatattgtggtttggtaagattcgagttttgggattttgagcgttattggtagtggggatgcgggtaggttagtttttttggagtttttttttcggcgatttttggaggcggtaggtttttgaataatggtttaggatagagtaggaagggagataggaagtttcgagttttaggtggtttagagttgtggtaagagagaagggtttgggttttgatttgagtttacggggaattcgggggagttggtttaaatgatttttaagttgttttgaacgtagttataggaggtaggtttgggttttttagagtatagttattattgttcgggagagagagatatttaaggacgtttttagttagagtagtttagtagtttaggttttttttttttttagagaatcggggtttttgaattttaaagcggaaggggaagtaaagacgtagaaagggaaaaattttttttgggttaggagttttgagtatatattcggaggttttggtttttaggttcggttttggtgggaagagttgggggtagggaatttgttttgatttaggttgatggagaggtattaggtttggggatagaggttgggatacggcggaggttttggtggttagaataattttgggaaaatagtcgatggtagatattttttcgtatttaggtttttttttttataggcgtagaattagtttatagatggttgttgataaatatttatagttatatgtttgtttataattgtattttatatatatatacgtagagagtattttttttaggagtcgatgtggttatattttaagaatatatgtttatgtggtttcgaatgagttatatatttttaaatttataggatagaattgagagaagatttagaaagatttagtggtttttttttattttttttatttttttttttatttttagttggaatgagattaggtatttagattatagatttttaaggttttatatatagatatttatagttttatatgtaggtatatatagttttatatatagatatttattgttttatatatagatatttatagttttatatacggatatttatagttttatatacggatatatatagttttatatatggatatatatagttttatatatagatatatatagtttcgtatatggatatatatagtttttatataggtatttttttcgtgttaagttagtagagatttttagttttgttcgtattggttgttttttttagtttagggatgtaggttttagttcgtttttgttatttaggattattaggtgagggtaggtcgtagattaggggatttatggaggtttattttgtatagttagagagtttatgttttttttttattgtattgaatttttatattttaatgaaaattattagtgagatttttgaagaggttgatatattaggtaagaagagagtttaaggagttttttattttttggttaaatgtttttaggtttagagggaaggcggagaggtttggttttttttgagttttttttttgtgttttgttgggtttttatagttagtttggttttttttttatttgtattagtttttggagttgacggaaagggttagttatttgattcgttattgtttttaattcgtggtagtgtgatttgatagtaaatatttttttaaatttcggtttttttatttgtattttggggtgataatagaaaggttttattgggttataaatgtgtttttgtagagatagtaagaggtaagagtaagagttttcgttatttttgttttttttaatttttatttatatttttatttttatttattttcgagtcgttgggaattcgagagtatttaattttgaggatagggtaagtttttgttattgttttgggttataaattgtaggttgggattaaaggtagtttgtaattatcggtaggacgttattttatgttgtttaagatggaggtattgttcggggtaaagttataaataataaatagtaagttagtgtttgtttttttttttttttagtagttgagtttttttagttaggagatgtttggtttttttaggaaagggattaggcgcgttaggtttaagatggagaaattgaggatataaaagatgaggttttgtttttaatagaagtagttaggaggagggattttggagtgggatttttattttgttagtaagtaggaaaattgaggtatgtattgataacgatttttttttatagttgtgagagtgtatatatttaaaagcggagaaatggagtttaaggaaaaatttttagacgtttttaggagtattgggaaagtcggaggtaggggcggttttggtgttagtattggcgttggttgattttcgtttttaggtaggtagttgagatttggtaattatttttagttttggaggtcggggcgaaagttgtttttttacgtgtgtaattatatttaataaaagggggaagttcggaggtttttttttgggttttaatttttgggtttattttcggtagagtttaattgtttttcggtaaggaaggtgtttcgggtagttgagtttgggttaagtcgagggagtgcggggcggggaagtcgtttttagtttttgttggtcgggtttggatcgggttgcggaaagagttggtgagagaaattttttcgggttgtaagcgtttttattttaatttgggtttttttttttttaaatgtgttaaaagaacgacgattaaggcggtttcgtagtgttttttgggtgcggagatcgcgtttttacgaaagagtttttatcgagtttttttttgttgtaatttaagattttattatttttttttttagattttgggttcgttttttggttttttgaattttttgttcgagtttagggcgggtcgtttgggttataggagatatgtcgggttggagattcgacgttttttagcgacgtagagagtttttttgtatttagggtagggatttcggcgtttcgtttttaaatttcggattcgatcgtcggagttgtagtcggcgcgtattggttttagtttatttgtttcgagacgcggggtcgttgcgggaagttgtttttttttttttttttttttcgttttcgattcggtggcgataggtttttgttgaaagtagattgttattttttcgtttatttattcgtaaaagtagcgtttttagcgttaaggtttggggaggcgcgggttaggttggagtttttggggtgtcgtttaggggtttagtttcgatttttcgaattagatttagtggttaaatattagagggtatttattttttttgtatcgatataatttatgtattacgaaatgtgtaaattttgtcggggtcgtatttgaatttagttagagaattggggtgtgttttgtatataagagacgatttaaagaaggtagaaacgaaaattcgatagaagtagtaatagttgttgtgggtgattgtggggtgatcgtaggaaaattcgagtttgggattgaagtttgtttaggaaggggcgattgttgtttaattttggagggagggatggcgaaggaagatgtttttaattttttattttgttaatttttatagtttgttttattagtttggtttaaatataaaagttgttaaatagaaaaatagagggtttggattaaaatttaatattttaagttaatcgatttgtatgattttgtataattttttttttattataatttatatatagtgaagtgtttagttttgaggaggaaagttggaagaattgttatgtatgtgtatattgttagttaggacgattatttcgataaagaaatagattatttatatgtttttttaaacgttgtaaaacgttaaagtaaaaatattttttgtaagttgttttaagaaaattttagaagatatttcggagtatcggggattttattttgtttttgatagtagtgttttttgaatagggtgatattttagttagggtatttgcgcggtttcgattttaatgcgaagttttaagcggttgcgttaggaatttcgtcgcgatcgtcgggttaagtcggagttattaagttttgagtcgtacgcgttgcgacgtcggtacgtagtaggaaaatagattaaaacgttttatagaaaatttcggcgaagtttcggaggattttggtttttaagattagttgggcgtatttttttcgggacgtttttttttttcggttttagcgtttttttgtttttagtcgcgcgtagttttgttttggtggtaaattgaaataagaaatggaaatatattggtttttgttgttgttagggatgagaggttgttgacgttcggcgcgtttgttcgggtttcgggtttttttgtagatttttggattggggtgtttgaggttaggagaggagggggatagttgttcggagttttcgcggtttagaggttttgggatgatttatggggggggcgcgttttgttttggtgagtttttcgtttcgagggtaggcgaggtgggtgggtaggggagtgtatgtcggagagaagagagaacgtttaattagagagaattttttgttttcggagttttagcgtttttagttttttaaatttttgtttaggaagtcgaaggatttaggtttaggtaacggtttggggtggggcggtaagagcgtcgttttgtattcggacgtcgtttgttaggcgttatttggttatgtgcgttcgtagcgtagggtttttcggttattagtataggtttttatcgaggtgatagttatcggattgggaaattaatattgcgaggattcggttatgtgatgatatcgttcgggggaattcgagtggaagtcgatcgttttgtggtgttattagataggtgagaagtagtttttttaaatagggttttttgttggaaggaggaggtatttttttttagttagtgagtttttttagttgtaatcggggttttttttaatattagttatcgcggtttttagaggtgtagttcggtatattttttttttgtagatgtataaatcggggatatttttatttttatttaagatgttttttttttatttagtagaggggtgcggagtaaattcgggataataatttgcgtgttgtttggaagtaggttttttagaaaggatgataaaaatttggtgatgcggaagaagtttttattgtgtttaggaaagggtagcggttttttagttgtatcggttttggtttcggtttttatttttagtacgttttgttattttaataaagagcggtttttttatttgattttaattcgtattagttagcgtcgaggaaagagaggaatggaagggagttgtggtttagcggcgaggaagagttacgtagaggtaaggttttgaggagttaaggttggggtgtgtagggtggtatttagggtcgcggatcggttcggatttggattttagaggtagttggaagggttatcgtggcgtttcgcggtttttagggtgtcgttttggtgaggagggggttattgggagatacgggcggggtaagaggggttatcggttgttaagtatttatttttttcggtgaaggcgtcgtttgtattcgggatcgtttggttaaggttgttgggtattggcgtcgttgtatattgggggtagagagggagttagtgtttgttttatcggatttttaaagtagattttttaagagtggatttttattttgaattggaggtttagtatggatgttggttttacgtatttcgtagagggataggatttggtgatttaggttagagtagaataattggttttttagggttttgaaggttataatagagaaggttgggaagttgtgggaggtttggattatgatattgatgtttagcgcggtatacgtggggatcggggtttatagttgcggtgtagattattttagtttttatttttgtattttttatttttttatggttttggagaagtatgttttgtttcggggtttgaattttagttgtatgaaatgtaggagtgttgataatttttaaagatttttttggagtttttgtgttggtagtagtttgggtttatttttattttttttgttttttttttttatttttatacgtatttttgtttaggagaaattggggtaaggtgggtggaaaaggtttttttggaggttaatataggttttgagtggggagttattataggatataaagtcggttagaggttttatagggttatggtggaatgtaggttttgggtttaggattgggatgtaaatagggagggggtaagtaagtgtttttgtgattaggtttaagttgaggtttcgggtttatggtttttgtgtttatttattttttttattttagtatttatggagtattttttttgggcggatttttttttaggaggtagaatatgttaagtttttgttttttgtgttacggtttatgtttttttaagtgttttgtatagttgggtttaataaatgttcgttggttggaagaatgaatgaagaattggtgttttttgtagtgttgtttttatatggttaagtgtatttaggagttagtttaggtgtttgtgtgagcgtgtgtatagtatgaatgtgagcggtgtgtgtcgtgtttattttttttgggtttacgttttgttatttgagtgttttagggcgaggtcgagggtttgtgtgtagttcggtgaaaggtatgtttgttttttggtatttgtgtttgtgttttttagtgtgcgagttttaggtgtgtaagggtgagtattcgtgtgtacggttttggagtttttttgggtttgtgggtggtatagtttttgtttttagaggcgtttttagggagaatgattaagcgtttttgtattatggtttgtggtttttttgtttttggttatggtttttaggagtagttgatttatcgagtggtaggtagaatttttttgtggtaagttttcggtggggtttaattatttttcgcgttattttggggttttcgaatatggtttatttagtttatttatattgcggcgaggtcgtttgataagttattagttttggaatatattttttgtttcgtgtggtttattgcggaagagacgtgtttttggtattgtttgtgtttattgttgattttatttagtatatgagtaaattgaggtttaaggggaaatggatttttatagttaggttagtaggagggtaggaatttatcgagtttttttttttttattataatgggtggaaaggtagaaagtgttggggaatttaatttatttattcgtttttttgttggatgcgatttttgtaataagtttagtaagttgtattttttttgtgtattaaatagggtagatgtttgtagttttgttttagtttttttagaagtaaagtagatttcgttatgagtttttgggtattagaggatagtaggagagtattcgtggaatttttggtgggattgtagggatttgattttaatgtagttttattaggttgggatttttgttttttgtttagttttttaagttgggttttttttttttaagtttttgaaaattataagttagggttagttgaggttagatgattaattttttttattgtgtaggattgtttattaggttttgagggtttttggttatatcgaggaaattggtattttttttgattttgtagtatatatataatgggttatggtgatatgttggggggttttatttaaggttggaagagatggtagttattttttggtttatatgttttattttatagataaaggggattgagaggtttgattttatttacgtaaggtttattaaattttgtttgttattatgttaagttttgtggggtattttgggaagttttggatgtagtttttgtttttaggtttagaggtagagatagataagtgattttgaaattttagtttagtgggatgggttttgagatggggaaagttttgatttaggttttgaggagaaggttaggttggtttgttttggggcgtgtaggcgttattagggtttggtagtttattggaagttatttaaggggagggtgtaggaaagttgggggaagttgggatttgtttaggttaatgagttttttttagtggttggaaattttgaggtttttttttttttgattttttttttttttttttttatgtttttttttggtttttttatggaaatagttatgtataatagtttttttatttttttagtgttattttatttttttttgtgttgaatggtattttggttttgttttatttgggaggggagtatgaggaggatgtgatgatggagagaggtagtgtgtttgtttcgtatattttgtattattaggttttttgttttattttttatattatattttttgagggtgttaggatattgtaaatgatagtggtggggttttgattaggttttagagtgtgtatgtagagtttggggtttttttggatatgtgagttttttcgatgtttttatgtggttataaggatttatttatatttggtttatattttagtatggagatgggataattttagttttatggtttttgattttaaggagggagtttatttttaaatggggaagataaatatgtatatagttttattgtatggtttttttgttgtggttttagtttttttatttttgaattttttttatgggatttagtggttttagaggttttggggttttgtgatatttattaagaggggtgaattggttttttagaatttttaagatgttttaggattttatatttttttttatttattgtattaggaaagggggaaggttggtttagtttgttaaaggttaagagtttgggatgttaggtttggtttttggtttgagtttttttatttataggatagagataataatgggttttaaggtaaagaaggtttagagttggttgttgttgtagaattatgagatagtttagaataattgagcgtttttgtttgtgcgttaggtagtatattagtgttgtttatgtatgattttatttaattattattataattttatgagattggtattattattatttttatttcgtggatgaaaattgaggtttatggaagataagtaattcgtttatagtgagatagttaggaaggaagagtcgagttttgttggtcgagggttttaagaaatttaaaaggtattttgttttagaatgattttgattagatttgagataattttaattttattttagatgatgtggagatgaaagatagggttttataaatatggtttttagggtacggtgtagtggtttatgttcgtaattttagtattttgggaggtttaggcgggcggattataaagttaggagattgagattattttggttaatacggtgaaattttgtttttattaaaaatataaaaaattagtcgggcgtggtggcgggcgtttgtagttttagttatttgggagattgaggtaggagaatggtgtgaattcgggaggcggagtttgtagtgagtcgagattttgttattgtattttagtttgggtgatagagtaagatttattttataaaaaaaaaaaaaaaaaaaaaaattatggtttttaaagcgttttttttagttttataatcggggatgtagaagataagtagtgttaggagtaaatttcggtatttgttaggttgaagttttatatttgattttgtgattttgggtatagtttttttatttgtattaggtgaaaatagtgttttaggtatggtatagggttttatagttggtatgaggaatgattgtatgagtttttagaagttttaggaatatgagagaatttttgattaaggtagggtggagttgaggagtatttgtgggaatagtgttttttaggaaatatgagagatcgtaggaggttttgtttgttttgattttaattttttttagagtttggagttagtttatatagtagatgtttaataaatgtttgttgttgagtgaatgaatgaagggattttataggaggggaatatgttaggaattttgtaagtttttttatttttttttcgtttattttttttttgaatggaggtttggggtgagagtttgttttgtcgtttttttgtattttggtagaaaattattgatttttttttttttgtagggttttttgtggggtgtaggagtagcgaggttttgggtagttttatttagtataagttttggttttttttaattttagtagtcggaggagtattttttttttttattgttttttttttgggttttattttattggttataggtttgcggtttgattgttatagttttcggggtcggttttagttaaatggttttttttttttatttttaatttttttttttaggttttttttattttttatagtgagtttcgtgttttgttcgttggtatttttatttttgttatttgtttagggtgttgtttgagagttgttgaggttttttttttagttttttatttatttattttttattttgggattttgagatttatttgtaagggatgtagtttttttttttggttaggatgttatttgattttattcgggtttttagtagggtattcggttttaaggtttgggttttttttagtatatttatgatttcgtttattcgttttatttcggtatatgtaatttgagggtatttgaatatttatggttttttgagttttattaaaggtttaggtggaggaattgaatttttattttatagatggaagttaaagtttaaagagggggaatagtttagaaggaatgtatggaggagtgtgcgtttggtaaaagtttttttttatatttaatagattttttagtttggtatttttgtgttaggtagggattagagtgtttggtagtgaatgaattggtttttgtttttagagagtttatagtttggttagaatgtgttatatgttatgggaatttttagggaaggtgaatggattggggttttttgagtatggatattcgaagtggattttgaaagttgaataggagtttattagttgaaggagatgaaagaggttttttagatttaggaaatagtataaattaagttttcgggtaagggaagaatatgaagtaagtgtgtggagtgtaggggtatgatgtatgtcggtgaggtgggttgaggaatggtaggggtatagttgaagagagttttttattttattttattttattttattattttttgagataaggttttattcggttatttaggttggagtgtagtggcgtaattttagtttattgtaatttttgttttttaggtttaagtgatttttttattttagttttttaagtagttgggattataggttcgttattacgtttagttaatttttgtatttttagtagagatagggtttttttatgttgtttaggttggttttgaatttttagatttaagtgattttttcgttttagttttttaaattgttgggattataagtataagttatcgcgtttggtttttgggttatttattttttattaaagggtttagattttggggaagttattggagggttttgagtaaaatagtgagattttaggttgagtgttttttgtatggtttagtatggtttttgttttttgtatttaaaatttttattttaattaagaatgaattttttattgtggtaaaatatatatagtataaaatgttattattttaatatttataagtgaattttttagtggtattaagtatatttataatattgtgtaattattattattgtttttagaatttttttattattttaaatagaaattttatatttattaaacgggaatcgttattatatttttgattttttatttaagtgatttttattttattttttttttgtggatttttttattgtaggtattttttttttttttttttttttttgagatagagttttatttttgttgtttaggttggaatgaaatggtgtaattttagtttattgtaatttttatttttcgggtttaagcgatttttttgttttagttttttaagtagttgggattataggtatttattattatatttgtttaatttttgtgtttttagtagagatggggttttgttatattggttaggttggttttgaatttttgattttaggtgatttattcgttttagttttttaaagtgttgggattataggtgtgagttatcgtatttggttttaggtattttttataggtggaattatatagtatttttttttggcgtttggttatttgtgtattttttttggagaagtgtatttaagtattttgtttatttttgaatggggttgtttgtttttttgttttttagttataggaattttggatattaatttttttttagatatatgatttgcgaatatttttttttattttatggattgtttttttattttttggatattgttttttgatgtatagaagttttatattttgatgaagaagtataattttttaatttttttattttgttgtttgtgtttttggtgttatatttaagaaatcgttaataattttagtgttaggaggattttcgtttatgtttttttttaagagttttatagtttagtttttaggtttaggtttttgatgattttaattttgaatatgacgtaatataaggttttttaattttatttttttttatggggatatttattttttttagtattatttgtagaaaagatggttttttttttatcgatcggttttgggatttttgttgaaaattaattgcgtatgtatttgagagtttatatttggtttttattttgttgtatttgtttatttggtttttgaatgattttttgatgtgaagtttaggattgtagaatgtataaggatttttgtaggttattcgtttatttttttgtttgtaggttagtgattaataggttatagaaatttagtttaaggatatatttgtttttcgggatttggagttggtgagaaggggtggagggtagagttaaaggcgaggattttagagttatagttttggttttggttaggtttttggatattcgggggtttttttgtttttttagttgattattttatgaggacgtggtttttggggaaatttttttgtgttttgagggtttatatatttattttttgagatgcgtatatttgggattattttttttattaagatgattttagaatttttttagcggagtttggaggagttttaagaaggaagtatttagtggttttatgttgttggttttatgtatattttgaagattttttgttagatttttaaaagaggtatttgtaattttttgttttttattttaggttatttagtgaatggtataattaggggttggggttttagggattagatagtagagtttaaggggagtatagttgtagagaagtagttgttttcggtttttttttttaggaattttttcggtttaggtgattaaatagaggtttgtttgagtttggttttttagttatgtgttttaaggtataatttttagggtttttggaaaattatggaaattgtttattttataattgtgttatataggttgtttgatgttttagatgtttttggtttggagaagtttatgaagtttaggatttggaaatagattttagtttatatagttgagtgattttgggtaaattagttgatttttttgttttagtttttttatttgtaaagtggggataagaattatgtttatttgttagtgatagggtgaggtttaaataaggtaaaataggtaaggataaagttaggtgtggttgtttatatttgtaattttagtattttgggaggtcgaggtaggtggattgtttgaggttaggagtttgagattagtttggttaatatagtgaaattttgtttttattaaaaatataaaaaattagttgggcgtggtggtgggcgtttgtaattttagttattagggaggttgaggtaggagaattatttgaatttaggaggtagaggttgtagtgagtcgagattatattattgtattttagtttgggtaagaagagcgaaattttgtttttaaataaataaataaataaataaataaataaataaataggtaaggattttagaatagtttttggagtatagtaagtgtttagttaatgttagttgttatgattgataagattttgttggaattttgattttattagattggtcggaaattttgataggtagttaaagttgattgggatgtatagagttggaaaatgaagaaattattattgaatttatgattattgtgtggttgatattgttttttaaaatatggatgagtgatgggaggggcgggggttgttatttttatttaacgtagcgggggtaggttttaaggagggataaaggttatttaggttttttaggttttttttttttataggttgttgtatttcgtatatatgtgttatgagttggggaataattttttttttgttgaatgtgttttttgtgtttatttgatttagaattttagtttgtttttagggtaggggttttgttgtgtttttttttgattagtatagggttgagtatagagaatcgggtttagggaatgttaggtaatttttgtattttttttgggttttagttttttgggttttatttgtaattaagaaagtatttggtgggtattgtttttggttatatttggattgagattttttgtggaaatttattgggagatattagtatttttaatttgaagatgaggaaggtgaggttgtttcgttgtgaattgaatttagattttttgaagttaaagagtttttttttttttttgtttagggggtttatgtttattgtttggatgtttttatgtttatgtgtttattagatttgattagtatgtgagagttttgtagacggtggagggggtgtattgggaggggtttttagtatattgtatgttgtacgtgggttatattattttcgtttatttattgaaatgatgattatgttttttgatcgtttagatattatttttttttttttttagagttattttgagaattaggttagtttagtttaggatttttatgtgatatgtgggagtagtttttgtgggtaaagaaggaggagataaatttttttaaatagaacgagtaatagtttttttattagtttagtgttggcgaagttaggggtaagaggttagtttggaaatattatttgtattatgtggtaggtggatagtgagggttaggtttttttagggaatgtatgtgtttaagttttgttgtattaatgtattttttaggatttagttttatgagagaagattttatagagtttagttttgtgttatataaagtatttttttaggagatttatttcgttgtaggggatttattttgttaagaagtagtaataggtggaaaagagatgtatttgttttacgttcgttgtggattaaggtttgtttggtagaagggatatattatgtattatatatatatttttttttttttttttaagatggggttttgttatgttggttaggttggtttcgaatttttgattttaggtgattcgtttattttagttttttaaagtgttgggattataagtgtgagatattgtatttggttatattatgtattttaaagaagagatttttttgaattttttattttgtttagatgagtagaagttaatgaaaaaattatttttttttttttttttttttttttttttttttttttttgtttgtttgttttttttttttttttttttttttttttttttttttttttttttttttttttttttttttttttttttttttttttagatagggttttattattatttaggttggaatttaatggttaaattatggtttattgtagttataattttttgggtttaagtagtttttttgttttagttttttgagtagttgggattataggtttgtgttattacgtttagttaatttaaaaattttttttatagagatgggggttttattgtgttgtttaggttggttttaaatttttgagtttaggtagtttgtttacgttggttttttaaagtgttgggattataggtatgagttattatgcggggttaaaagaattatttttaattaatatgttaattgtgaatgttgaaatattgattatttatattttatttttattatatgtgataggtaaaattttgggaatttatttattttaaattttagttatttatataaaaatattaattaaaatttttaggtataattattttttagatattttgaattgttaattattttatagttgtaaatgtggattttttaaaaagtaaatattgaagaattttttttatttttattaattttaaggaagttgatgatttttttaaagtataaattaggattgggtatggtggtttatgtttgtattttagtattttgggaggttgaggtgagataattgtttgaatttaggagtttgagattagtttgggtaatatagtgatatttcgtttttataaaaaaaaaaaaaaaaaaaaaaatttaattagttagttgtgatgttgtgtgtttatagtattagttatttaggaggttgaggagggaggattgtttgagtttaggaggttgaggttgtagtgagttgtgattgtattattgtgttttagtttaggtaatagaaaaaaaaaaagtaattttataattaattgagttattatttttttttttttatttaaggggagaaaagttttgttgtttttttagtttgtaagtgattttttagattggaatgagtatatttgggttaggcgaggtggtttatatttgtaattttagtattttgggaggtcgaggagggtggatttcgaggttaggagtttaagattagtttggttaagatggtgaaattttatttttattaaaagtataaaaattagttaggtgtagtgattagtgttggtaattttagttattcgggaggttgaggtagaagaatggtttgaatttggggggtagaggttgtagttagtcgagatggtattaatgtattttagtttgggtgatagagcgagatttcgtttttataaataaatatataaataaaaattaaagaaggagtatatttgagaaagaaaagatttgatgttggtgaaagtagtatattttttttgggattatatgttgtttttgtaggttaagaaatttaattgtttggttaggcgtaatggtttatgtttgtaattttagtatttcgggaggttgaggcgggcggattgtttgagtttatgagtttaagattagtcgggataataagagtgaaattttgtttttattaaaatataaaaagttaggtgtggcggtatgtgtttgtagttttagttatacggaaggttgaggtaggagaatcgtttgaatttagaaggcggaggttgtagtgagtcgagatcgtattattgtattttagtttgggtagtagagtaagattttgtttttaaaaaaagaaagaaagaaagaaagaaatttaattgtttaagattagtttaatttagtacgtatttgggtgttagatagtgataataggtagggcgagtgataacgttgtttcgtaatattttttttttgtttttggtgagggtatagtttaaaggtagaggttgtcgtgaatttattttttaaaagtttttttaagtttatataattaaataaatttaatatttgatttttatagtagttgttaatgttttattttatttatagtttttgttatatgtatgtgaaatgggttttttattgaaagggattttgggagttatttttgatagaggtttatggtttataaatgttattttgggagttgtcgttcgggaaatttgaattggagaggatgtatttggggaaggaagtaggtgggggtgatatagttgtaggttgagtaacgttgttttggttgttagttgttacggttaaatttatttttagattataattgtgttaatatattatggtaacgttttattgatagagtgggtgtcgtgtgtgggttaggggatatgtcgttttgtattttattttagttagattttatagttattttgggatgtggatgtttttagttttattttatagatgaggaaattgaagtatataaaggttaagttatttttttaaggatatttttttgtggtagaattataaggtggtttgggagtttttttaataattttttttagtcggtttttattttttttatggggaaaattggtattttttagttttatgtgaagcgttagttaaatatagttttaatagatttttttaataatattgttgttttaaaatattttttttatagagatttggagtcgttttaaggttgggttaggtgtttttgttttggttattattttgtattgtaattatggtttttgttattgaggcgagttatttgaaggaagggattgtgttttattgggttttatatttttattatttggaattttgtttagtgtatagttggtgttttaggaatgttgttgaatgaattaatgtagtaaataagtggtagagttaggggttaagtttaggtttgttttattttaaagattttttaattattttattttgtttcgtgtaggatttaagtttttttatttcgttagtttttggatgaaagtgatattatagtgttttggtgaaggtggtggagttgtaggattttttttgttatagaagggaaatagaggtttgggggaattaagtgagagatgttttgggatacgtttagggttatatggtttagggggtttgagagggataatgggtagatagattatagggttggatgtaggaggtgtagggtttaagttttggtttttttattattaggtagtatgattttgttttgggttttcgtattttggttgtgaagggagggtttggtttagtggggtttttgaattttgcggacgtattgttgggataggggagagtatgggagattttgtttttttggtagtgggttttgtcggggatagggttttatttaattatttacgttatgagatggagtttggggatgggacgaggagtcgggaaatttttagtttttttgaggagagaagttgataggggtatttagagtttagattgaagttggaatatttattttattttaggaggtattaggaagtgatttttaagtgttagattatatatgggttttttatggagattttgaagtttggtttattttagttttttgagatagaaatgattttagtggtttagtaatgtttttttagaataaaatgaagtttgtttgatttttttatgttagaaagataatttattattattttgaaaggtagtggatttggtatgggattatttagtttgttttttttagttatgtgattttgagtaagttatttatttttattggattttagtttttttatttgtgaaatagagatattaatattgattttatgggatttggggagggttagaggagatagtgggtgggttagggtaatacgaatataaggtattatattattgttgttatggttgtaattagttttggttggagagtttttgtttaaggagtttggtaatttgggatttgttttatttggggtgaggggatggtattttggtattttgttttattataaaatgtaatatgttttgtcgagttttttttgattggtaatatttaatttaagagttattttattgtagaggtttttttcgatttttttaattaaaattgatcgtttttttttgtgggttttgtcgtgtttgggaaataagatttttgttttggggattttggaatatttgatcgtgtttgttttttatgtattttttttattaggttatgatttttaagggaagttttgaatgaattagtaaggtaagatatagggtgggggagagaataggaaagataaattttagatataagttgggggatggaggggatttaggttttggtagaggggttatgggggttgagggttggataaagtttagggttttttttttttattattttttttttttatataaggaaattttatttatttggattaattgtaggatagttgaaattatagtagatttaaaaattaaagtattttttaaatttttaagttttaatagtagtttgattttggttttttatagtttttagaagagttgtttaaaggagttttatgttttaattgggttatagtggtttttacgggagtgagggtttttagagggttggggagtaatgtgtgtttttagagttggtatttgttttgtgatttttattgtaacgtataaggttttttgtagaattatgaatggtggtggtgatgaggggaaggcggggaggttgttaggtaaatttatttaggttttgtttaaatgattatatatgttagttttataagaggggtttttagggaaggtgttttttttttattagtttatatatttttttttttaaaaatttttttattttgatatagtattatatttaaagttataagtggattataaagaatttttagatgttttttatgttgattttttaaatggtgatgttttgttatatttgtattatttttaatttttttgggtttttttttgtgtttttttttgtgtatatgttttgtttatgtatgtattgatatatatgtatacgatatatagttgtattatttaatagtaagttgtaggttgggcgtagtggtttatgtttgtaattttagtattttgggaggtcgaggaaggtggattatttgaggttaggagttcgagattagtttggttaatatagggaattatttgaattcgggaggtagaggttgtagttagttaagattgtgttattgtattttagtttgggtaatagagtaagattttgtttaaaaataaataaataaaaaaagagtaagttgtagatatatgatttatatgtttttttgtttttaagtattttagtgtgtgtaggttttgaaataaggtattggtttatatttgaggttttagatggttaatgaagttgatttttagtagagtagtttgattaggggtagttttgaaggttgttgtaagggggttaattttttgaggtagttgagagtagttatttttttgtgattttttttttttttttttgattttgttttttgtttgtttgttttagttttatttatagtatttattttaggagggtttagtaggtatgttttaggtatgagatttaagttttagttttgttttttattagttttttgttttttttttttttttttttttttttttttgagataggtttttgtttttgttatttaggttagatggaattttggggttaagtgatttttttatttcggttttttaaaatgttgggattataggtatgaattattatttttggatttttttaatagttattgatttttagtaaggtatttattttttttggttttagtttttggggttataaaatggaaatttggcggttgtaaagaggttggaattttattggtggtataatagatgttttagtattttgtaaagtataaagtttagtttttggttttgtttagtttgtttgtttgttttttgtttttgcgagagtttagtattaattttttttcgtttttggattttgggaagtttattttatttttagattaagagaaaaatagttttttttatttatttttgttattgtaggaagaattgagagagtttttgtgtgagggcggagtagtggaggacggggtggtagattttgtttcggcggatgtttgtttcgggaagaatttacggggaagttggtaataagtttgttagttatatggaaagtcgttgggttaaacgataggggtgttttagggagtttttgtaaggtaaaggtttttgtaagttagttagttttttgagtatttattgtgcgttattttttttggagggttaaggaatttttatgggtttttaaagggaggttatttaaggaatgaaaaagagtttaggttttagtttgtttgttatttagttattagtgatattggtgggttttttttttcggcgttttattttgatcgtttgtttaatgaggatgttggggttatagtgtgggaattttgaggagattggaatgaggtaggaatgtgaaaatatttagaattaggggaggaaagatttttgtaaggaaggttagcgattcgttttatttatttttttgttttttgtagtgttggaatggtggtagacgcgtagtagggttgaattattgtttgagtggtaaatttttttagttaggatttgggtttttaaataaacgtttagaaattttattaggtattggggttttaggattattatttttcgtttagtgattttattggaattgtagtgttttttggtggttagtatgtataattgtagttttgattttggtttgttgggagttgggttttggaatttgaatgtttagttttttgggtaagtagttagggtcggggatttttttttagttttggttttttatagggttgtgtttttttattttttttttttatatttttttttggtaggaatttatgtaatgttgttgagttgagtaaatagaaggtaagaggtttgtttagggttagggagttgtcggggttatttttggttttttttgttttgcgttgtggttggttttttcgattttttttattttgaaaggttttttttttcgattttatgtagtagttttttgatataagtagtgtgtgtaggggattaaggattttttgtgtttggagtttagttttagggtttggggtttttttttgtagatatattggttatttttagttgtgtttgtagagttgttttagttaaattagaggtagaaggagtttagaggagttttttttaatttaggtatatataggtatttgtattaattttaggggtgtgttttgagtttttatttatacgaggtttaggttttagtagtatatttgggaggtttattttgattagtttatagtttagggagggagtaggtttatgagtcggtgttgtaaagtaggggatttagtgtttaagaggtaagggaggttttggaggaagaagggtggtttttggttgagttttgaaagtttaggagagggaatttatagtagaagaaaataaaaaataaaatgttttatagttaaaaaataaaaaaaaaaaaaggaaagataagattttatttttatttatcgtgttggtaaagattttaaaaatattataatgattattattggttttgaagtgggaggggatatcgtggtagttgaggatattatatgtttttggaagataatttggtcgtgttttttagagatttttagatatgtggataattgaattttatatttttagtttttggagttttttttaagggaatcgttatgtatgtattgagagatttaaattatagatttgttatgattttaaataagtagaaatttgtgagtttaatagaaaaggatggattaaataaaatagtgattgttttcgttacgtaattattaaggatggtgtggtagaagaatatagaatagtatggaaaggggtacggaatatggttagattttattaaaatgtttataggttgggtacggtggtttacgtttgtaattttagtattttgggaggtttaggaaggtagattatttgaggttaggagttcgagattagtttggttaatatggcgaaattttgtttttattaagagtataaaaattagtcgggcgtggtgttgggtgtttgtaattttagttatttaggaggttgcggtaggagaatagtttgaatcggggaggcggaggttgtattgagttaagagtgtattattgtattttagtttgggcgataatagcgagattttattttaaaaaaaaatataaaagtttataaagtaatgttttttttgtgtgtgtttgtgtgtgtgtgtgtatgtgtatgtgtgtgagtgatttttttttggtttgttttgatttttttttaattttttatatagaatatagattatatttgtaatgcgaaagaaaagttataaaagttatagagaaagttatttaggtgaaagtagtagttagttatagataggagaggtagagagatatgttaggtagaaggaagggtgttcgtaggagtgcggaagtttgaagatattcgtgtagtgcgttgtagagcggaagtaggtttttgaattttaagttagatggaaggttggcgtgtaagttcgtgagtttggtggggattagttttgttttcgggattttgaatgttatataagtttgatgtatagggttggtagatttagtaaaaagtaagtaagtaaataataaaattaggttatttagttaaatttgtatttgaataatgaataatttgtaggataaaagtattttttgtgttatatttgggatatatttatattgtttaaagtgttaattgtttatttaaaattttagtttaattgagtttttttaagtggtgtttgttttttgttttttataattttatagtatagagtttagttcgtttttagagtatgtattatttaggattttaattattgtttttagatattttaatttgtttttgggaaaataaatagaaaattaatttagattagtttcgtttcgttttttaaaaaaagaaaagaaataaaattaatttatagatttatattgttatttttggaaatttgtagtattttttgaggataaatgttttattttttttttttttttgattaaaatgagatttatttgatataaattgaatatttttgtatgtgttaaaacgttatttttttttagtattattttatttatttgtttattaaatgtttattgagtatttattgtatgttagttatgatattaggtgttatatagtagggtaaataaagtatatatgtttagatatattttttgttttatgggagggagagagagagagataataaataaggggaaaatagaagaataaataaatatttaatattggcgcggtggtttatgtttgtaattttagtattttgggagattaagacgggtggattatttgaggttaggagtttaagattagtttgggtaatatgaggaaatttcgtttttattaaaaatataaaaatgagcggggtgtggtggtttatgtttgtagttttggttatttaggaggtcgaggttcgataatcgtttgaatttaggaggtgaggttgtagtgagtcgagatcgaattattgtattttagtttgggtggtaaagcgagattttgttttaaaaaaagaaataacgtgtagaataaagattattaggaaggattttttatttatggaaatattattttttatttaattaattttttattgttgaatattttgattattgtcggtttttttatatattaaattatgatatgatgaacgttttttttagtgaatgtttattattatttattgagtaaatttttagaagtgagatttttgggtgaaggtatataaatttttaatttagtttttgttttatatatatgaatataattttgtattttttttttagttatattttttaaaatttgaaaataatatgttgtaaattttttttttttttttttgagatggagttttgtttttgttgtttaggttaaagtgtaatggtatgattttagtttagtgtaatttgtatttttcgtgtttaagcgatttttttgttttatttttttaagtagttgggattataggtggttgttattatgttcgacgaatttttgtatttttagtagagatggggttttatcgtgttggttaggttggttttaaatttttgattttaggtgatttattattcgtttttgttttttaaagtgttaagattataggcgtaagttattacgtttagttgtaaaaaattttttggtatatatttttatgagttttaatatatttatgtatagatttatgtatttattgttatagttaggatatagaatagttttattatattagtgtaagttttttgtaaataaattttttttttttttttatatttggtaattagtgatttgttgtttagagttttcgtagttttgttttttttagaatttatgtgttagttgagtgtagttgtattttatgtaaatttgagattggttttgtttatagattttaaggttattttttagatttatttatgttattgttaatagttttttttttttattgtggagtcgatttatggtttggatagattatagtttgcgtttttatttttttgttaaaggatatttgggggtgtttttatttcggggtgattttgaatagagttgttgtagatatttgtttatgggtttgggtttttttttttttaaaataagttattatttttgtagggtaaatatttaggagtgggattgttgggttatgaggttagtgttagtttaattagataagatatcgtttaagtgtttgtattgtgatggatgggagtttcgggtgttttatatatcgtcgtaatttggtattattaggttttatttttattgtgataggtatatagtggtattttattgtgtttttaatttgtatttttatagtgggtaatgaggttgagtatattttatgtttatttgttttttgtagatttttttgggtgaagtgtttgttagaatattttgtttattttttgttaaatattattattaattatattttatattttatttagattttattggttttttttaatgtttttttattgttttagtattttttttagaatatattgattatatttagtttttatggttttttggttttttttagtttggggtagttttttagattttttttatttcgagagtattttagggtttgggttggtggttgtgggtgagtaggatggtttgtgttattggttagtttgaggattgttatttttattttattttttgttgaagattggtagttttttgagggtcgggatattgtttgtttttgtaaatagttgtgtttcgtgtatgtgtgttgaaatttaagtttagttattattatttttttggtattatttattgggattggagttaaattagggatatttaagttgagttttggatagattttagtgttagatgaggtggggtggggacgtgattaatggttaaattttaattttcgtttttatttttataggatcgtttggatagtagtgggtttagttagtgtttttttaatagtatgaaagggttttatgttggtttgttttttttaaggagattatatcggtgtgtgtatttcgttatagggtgtgtggggttagtttattcgagaatagagtaagcggtatgttttttataaagtagatgtttggaggaaaaatagatgtaattaaaattatggaggataaaatgattgagattttttagcgttatatgtatgggtttgtgtacggttttatataggtttatattatttatgtttatatttatttacgcggatttgtatttatatataattgtttacggggatatatattttatttgtgtgtttgcgtttgattatataagtatgtatattttataaatttatttataagtaattatatatatgttttttatatttatttataatggtagatttgtgttataggttttcgggtgtatatttgtatatatagatgttattagtattttttttttaaaatggttttagaaggttattttttaaattacggttaaaaaaaaaaagaaagaaagaaaaaagaaaaattagttatttttggaaattttttaagggtttttttgttttaaaaaggtaaaattagattagagtgatgttattgggttgaattaggatagatgggtagaggttaagggaacgaagtaaggttttttattttatgtatttttttagttgaaatttaatagttaggggtttttagtattagaaacgatagtttttagtggtacgggggtttttttagggggagttttagtagaggttgaagggtttagtggttttcgattgagaatataattttgaattgaatgttttttattttattaaaagtagtttatggtaataatgttgatttaggattgtttgaagagtattggatattatgatggttatattgcgtgtataatatttttcgtggagtaggtattgtttttagtgatgtaggtttattatttgattgatggttttaagtagttaggggtttatttttagattaagattgggaagttgtagattgggattatattgttttggattttatagttttagttttgggataaatttattatgggaggggtattagtatagagttttttcgggtttataaggagttgttttagggaggatgtgagaagtttaatttttggcgggtggtttggatttacgttgggcgttgttgttgtttagttttatgttagtacgaggtgttttaaggttttgaagaaggtttgtttagtatttaggtaaattgagagttttttggcggttttttttattttagtgtggtggtagggtgggtgtggagttagtttttggtagattttggattgggtttttggattttggttttaattttggagtcgtttttatgaagttcgtttttgtttttttttttgttttttgttttttgtatggagatatcgtttaaggtttgtttgggtttttttttttttttgtttttcgtagtgatttttgttgtttgtgttgttagttttgaatggtggtattcgttattgcgtgtttttttttaatgtattttattcgattttttttttagtgggtaggaggatgaggcggttggtttatttattcgagagatattttttgtatatgttttatagaatatcggtttattaaaggtgtatatagatatttggatagagcgagagtttagtgatgtttgttagttagaaattgtttatttattttttagtaattttttattgtatttttgttatttgatttattttgtgttgagttttaggttgagaagggataaacggtatgaggttttagtttttggggaattgatattttataggaggagttggatattcggggtttgatgagattacgagttagtaaatataggtagttagtggagagggtgagtagaggatggaaaatagttataatttgggagggttttttggaggagtattggattttggaggttagttggaaggaggaatatgttaggtaggggttcgagatggggatttgggggattaaggttagtggttttttttggttaggagtagttagtttgagttatgggatttttatttttagtagtcgttttgttgaggagggtattttgcggggagttagatttgattagtatttaggtttttagttattatgttgatattttagttagttcggggttatttttttggagagtaatttgttggttttgtttagggtttagttttattttttatattatttttgttattttttgttttatataggtcggagaaatttagggttattcgaggaatagtagtgggaattgtagaaggaagggagatttagaggggtggtagtagttttttaatgttcgtagggatagggttgttatggggaagggcgttggggggttagaattggaattagtgaattagatttataggagatagatatgggttgggtttaaagatgagtagttttgttgttttgggggtagtgagttttttgttattttagattggaattagcgttaggtggagatgttgtagggtggcgagaggtggatatagatagtttgagtttggggttttaggatttagattttgagagggttgtgtttgttattttgattagttgagtggagttgtagaattttagggaatttttttttgttgtttaaatgaggaatttagttttagaatttaaagtaagttgatttaagataggttagaaggtttgttttttttttttttgaggaattaggagtagcgtttttttgaattttttttatttttgatataggtatattttttttttttttttttttttttaggtttttagggatagttttggttgttggtgagtaagggaggagggatttttaattatttcgttttttttatttgtaggtgagattttagagatgaaatgggttatttgaagttttgagaagagcgggggtcgaggttagggtttttaatttttggtttggtggttttcgtatattttgtgttatttttatttttgtttgtttatttggttttagtgggtagttggaggtgggtaaaattggatttttatttgttattatgaagattggattttttgttattttttttgaaaggttaagagttggtttagtgttgagaggttgtttttaggtcgtatttttatttttttatttttaagggttggttttgttttttataagatggatagagtaggacgttttggttatatgaggtttttgggttttttttgtttttatttttttttttgggaataaggtttaagatcgtaggggagggagtagagggtaggttaggagttgagaggttgtgttttgttcggaattggggtatgtttttttttttttttggttttagtttttttttagttaaaattaggagtttaggttggtttatattaatttttagtttttgtaatatggagtttttattgttgtgtagggtggttttaatttttagtaagcgtttatggggttgtgagatggggtttggggattagagtttagggtttagtgtttattttttttagttttttatttggtttttaggaagttgtaaaatagggatggttatttttgtgaggttgggtggggtttttaaaaaaaaaaaaaaaaaatttaaaatataaaatgtatttgtttgttaggaagataaatatttttgttgaaagtttttggtttagttgttagttgtagtttgtagaatgttgttattgaagttatggttgtttgtatgtgtttgggtttatataggtgttatgcgtgatgtcgttgggtcggtcgtgtatttttatggcgtttgtattgttagtggtttttaggagtagttttttgaagttgtttttaggtttattttgggtatttatttttatgttttttttttgatgttttggagagggaggcgagaatgttataggttaaatgttttttttagtttttttagtgtgtatagaaagttaggaatgagacgagtttgaagttttagtttttaggatttggatggagttagaagatttggattagaggtattattttgatatttaatgtttatcgtttggatttatttttagaagaagaaatcgcgggttagagtggttgatgtttatatttattatacgtgtttgttgtgatgattaaagttcgtgtacgtgaaaggtcgtgttaaatgttttttaaacgttttattaattgtgtttgtttttttatttaataagttttttttttttaagttatagataaggaatatagttttcgaggagtttatatttatatttgtagatatttagttggttgtttttttttaggtatttgtgtacgttttgtatatgtttttgtgtttaagggtttgtatgtttggaggatttttttagggtcggagttttttaatgtttatagggtttgtgggtttgtaagtttagattagaaatgtgaatattaataatggtaaaattatatagttagtatattagtttttttattttttatagttattttatgaggaagattttagaagtatttttatttttattttatagagggggaaattgaggtatatagcgggtaggtaagtttttttgagtatatagttggggagttatggttataggatttatggcggggttattaagagtttatgatttaaattaggggtttttagtttttaggttgtggattagtatcgatttatggtttgttagtaatcgggtcgtatataggaggtgagcggtaggtgagtaagtattattgtaagttttggtttttgttagattagcggtgttattagatttttatagaggcgtgaattttattgtgaattatgtatgtgagggatttaggttgcgtgttttttaagagaatttgatgtttgatgatttgaggtggaatagttttatttttaaattatgttttattataattttttttatttatggaaaaaattattttttataaaattagtttttggtgttaaaaaggtagggattgttgttttaaattttttgttaggaggtgagtgtgtttgtttaggaagtttattaggttgtgtggtggtaaagtggttttttgttttatttttttattttagtttttatttttttttttttgatgtgtatgggttgattcgtttttgtagttttgagttaggaatgtgtcggtgggtggggggtttatttgttagacgtagtggttgggagttgtgtttatgtatatttatttaggttcggggttagcgtgttggggatgaaggtgttcgggtagttttagtaaatagtgggtaggagttgtttgtaataggaaatgtggtttatgttttaattttatgtatttttaaggaagaaagattttttttttgaataataggtgagattagtgtgtagggttggggggtagggaaggaggtgttgattttttagtattggatttttggggtagagtttttatagtttttgttgaatttttggtgggattaggttaggaaaggaggggtatttttgtttgttttaattttgggttttttttattttaagttttattgggttagatatggttgttgaatgagttttttttttatttagggaggttatggtattggggttagaattttcgggttttagaaaagttttgatgtagggaatttttttagagagaggagtttagggttagtgaggtggggattaaaggttatagaggttagattggttgttttaggtttatataatattgttgttggaagggatttagtttaagatgatggtgaagaggtttagattggggaagagatttgtttaaggttatatagtaagttaatggtaagttagaattagaagttaagttttcggatttcgtatttaatgagttttaagaggaaaaaggtagggggtggttattcgagtgttttattttttttttgatatttttttttttttgtttggtttaattattggtttttgattttgttttttttttttttagttaaagagagttttttgggtgagttagagttattttttgattttgatattgtggggatggatagtagttatttgagtgttaaggaggttggggtgaaggggttttaggatcgggttagtttagatttttttagtttattggagaaggtcgatttagagagtaataagggtaagaagcggcggaatcggattatttttattagttattagttggaggagttggagaaggttttttagaagatttattatttagacgtgtatgcgcgggaatagttggttatgaggatagattttattgaggttcgcgtgtaggttagtgagggttatttgggagtgaggttggtaaagtagagtttgtttttgggtttttggttgtagttggggttttttgattgtttattaattatattatggtttttttttttttagtttattgagaatttgaaagtgggggtttttagtttgttttttatgtttttgttttaattagagcgattttgtttttattttttttaatattgggtttttgtattgtggtggggggttgtaaaggaaggagggtttttagtagaggggtaggaaggttgttgttggttgtttttgggttttatatagtgtaagagttttggtttttttatatagagaagggttatttgtttttgttttagaaggtttattttttagataggaaataggataaatatgaagataatgtttatagtattttagtgggtagaaatagagaatagtttagtttttttttttgtttagatggttgtatttttttttattttttaagttttaatttatattttttttgagaagtttttttgattattgtggttaaagtagtagtttttttattattagttaataattaaaatatttaatttagtataatatagtggaatttaatatttaatttaatttattgtaatttaatagaatataatttaatagaatttaatttaatataatataatatagtggaatttaatatatttaatttaatttagtgtaatttaatataatataatttaatagaatttaatttaatttagtataatataatggaattgaatatatttaatttaatttaatttattttaatataatataatttaatataatatattttaatggaatttaatttaatataatataatataatggaatttgatatatttaatttaatttagtgtaatcgaatagaatttaatttaatttaatataatataatttaatagaatttaatttaatttaatataatataatggaatttaatatattaaatttaatgtagttttttttaatataatataatttaatataatatattttaatagaatttaatttaatataatataatataatggaatttgatatatttaatttatttaatataatttaatagaatttaatttaatttaatataatagaagtaaattagtttattttttgttatattgttttattttatttttttaaaaattttttaaattttttttgttttttttttagagatagggttttattttattatttaggttggagtgtaataagatgattatagtttattgtagttttaaatttttaggttaaagtgattattttattttaattttttaaagtgttagaattataggtatgagttattatgtttgggtttattttattttttgggtatttttgtttattttttttaaagagattgggtttttttttgttatttagcgtggagtatagtggtgtgattatggtttattgtagttttaatttcgtgggtttaatggattttttcgttttagttttttgagtagttgggattataggtatatattattacgtttgggataagtttttttattttttgtagagatggggttttgttttgttgtttatgttggttttaaatttttggttttaagtaattttttattttagttttttatattgttgggattataggtatgagatattgtgtttaatttttattttgttttttttataggattgttgattggtttacgttattttatttgtttgtttttttttattaaattgtgatttttttgagattaagtattgattgtttattattgtatttttattaattagagaaagttaaacgtagagtattaagtttaaaaaataagtattcgtggattaattaatttttgtttagagagttgtatttgtttcgattagtatgaatttatagtaaagaaaggattagaaagaaagaaaagatttatgagtagttaaaatataggtgataaaatttatatatttaagtttaagttttaatttaatataaaataaatgttataattagttcgtttttttaatttaaagtatgttggaaatagtaaataaaacgttgttatatagtagtttttttttttttagtgggttagaaaaattaatagttttagaataaagagaaattttttttttttttttttttttaattagtaaagcgttatgtagtttagtgggttgagttttttaatgttaggatagagatgttttaattttgtaatttttagtaggttttagggatttttgaattaatttatgaaagtatttttagtagtattgttttaaggtattagtaaaagatttattagttataattattttttgtttaagaaggtagaggtatttttaatagagtttataaattttttttttaaaatggttaatgtggaaaaggattagtggttattagtaaatatgtagttgtttagaaattgtagttattagaagtgatgttgaagagttgtacggttgagttgttgtaagttttttgagggtagtttgttattttttttttatttttttattttttgagataggattttattgtgttatttaggttggagtgtagtggtgtgattttggtttattgcggtttttattttttgggtttaagcgatttttatgttttagttttttaagtagttgtgattataggtatgtattattatatttagttaattttttttattttttggtagagatggaggttttattatgttggttaggttggttttgaatttatgattttaagtggtgtatttgttttggttttttaaagtgttgagattataggcgtgagttattatgtttagtttagattgttttttttttttttagatagagttttgttttgtcgtttaggttggagtgtagtggtgtaattttggtttattgtaatttttgtttttcgggtttaagcgatttttttgttttagttttttgagtagttgggattataggtgtgtattattatattcggttaatttttgtatatttaatagagatggggttttattatgttggttggttggtttttaatttttgattttaggtgatttattattttagttttttaaagtgttgggattataggtatgagttattgtatttggtaagattgttattttatttttttttagtgtttaatgaatgtttgatgaaggatgatagggtagttggggtttttttgtgaatttagaagtttttatatatttagattttatttgaatttggataattagttatttatatgattttatatgtttgagtttggataggaattttagtatttagtttgatttttagtaaatggattggggaggatttataggtgtaggtagagaaaggggtatagttggttatgggatagttttgtaggtgttgtgttggtgtgggataaatttgttttttttttgtgtagtatgtgtgtatatttgtgtttgtatatgtgggttgtatgtatgttttttaataaatatatgggagtgttcgggagtagaatttattaagtattgaaagaagaatgacgttttgagtataaaatatgaaaataaaggcgtatagagtattttttagttgttattatataattaaaatagagtgttttttgtatatatatatgcgcgcgtatatatatatatttatatttatttttaaaatggagttgaggtagtttataattaaagatttatttgtttaatttaaaaataagaataatggtatgaaatgtagaggtaatgtggtaaaaaaaaatttaggttaaggtttatggttgttattgagtataaattttaatttggagttttttggtagttaaggtagaaagggaaattttgacgtgttgtatattttattatttagtgggaggattatagaattatagaacggtagtgttggaaatgattattttatttttttatttgatagacgaggaagaagaggtttataggtgggaagttataatttgaagttaatagtagttatttagtagtagtattgcgattggaattcgggatttttgagtcgtagtttagtgtttttttgattttagtttgttgtataaggatatatgttagattgtttagaggtttttttttgtataaaggtagtagggtgggtgggatttttatgtgcgttagatttttgggttgagttttaagtttggtagtgttttgggggggtaagggggtggtgatggaattttttgtttgtttttgttgtgtttgtttagggtttatatttagttggtggtaagttaggtgtttggcgtagagtggtggtggggatagggacggggtaatgggggttttaagatggattttttttgggaagaagtttagggtttggttttgttttagggggttgtaggggtttttttttgttgtttgggattttaatttttgtagttggtgtttgaagataataagatagaggttttttcgttttgggttatttcgttttggttttagatgggttgcggttagcgaggttttcgttaagatagttggttttttgtatagttcggttttcgggagaggtttgtgttgagtgggtttaggttggggtggttttgaggtatgatatttagatcgggagaatagtggggatttcgtggttggttgtttttttggggttgtatagtggagataggtttgcggtgtagagttgggaggtataggaacgggcgtgggggttggtgtggtatttggaagggagttttcggagtttttggggcgttaggggttagaaatggatggatattttaagttttaggatttgtagatgtgagtatagaaggggtcgtgaggatatttttgttgtttttaatttattggggaggatattgaggatcggttaggtttatttagtttatgtttggatttgggtagaaaagttagaattgggtgcgtagggtaaggttttaggataaaggaataggagaagaaggagggaggaggtgggtagttttgtttttatcggtcgtttattcgttttttattatttttatttttagtttttaaataaattttttagtttgatttttttttatttttgttttaaagacggtgttagttttgttggtttttttttcgtttggttatttgttttttttagataatttatattttttttttttttatatttagttttagcgagttcgcgttttatattttatttttttatatggtttttttttttattttagatttttttgttaggcgttggttattttttttttttttcggggttttttttcgtttatttttggattttttgttttagagtttgtagggatattttttatttttatagttttattatggggatttggaatttatagagatataaggagaattttaatagttatagtgataaaaagaaaaagagaagttattttttttcgtgtttttagtggttttttttttttttttagttttttttatagaaaattttgggaggttgaggaaggagcggaaagacggagttaagtttgtaggaaattaaatatgaaatgaaaataagtttttttgatttatttttttattttggttttagttttttattttaggttattgataaagagggattttattttagtagtatagagaggagattttatttgtttttggtttttagtgggtagttagggtttggattttaggaatttttggaggaaaaggggttttgggaggttagggtaggggttgagattttaaattggggagagggttcgtttttaaggaagaggtttttttttttttagttaatgtgtgtgtatatatgtacgtgcgtgtagttatattagtgggtatattcgtgtacgtatatatatgtttaggattagggaggggaaagtgagttggtataggagtggagaaatataataatgtatatttttgtttatttttattttttttatagtaatatgagatatatttttattttttttgattttttttttttagtaaaagatagtgagaaaggttaggagttgtaaagaaataaatgggaagtattttaaatatttttggattgtattttttatttattttttttgttgcgattatgaggtattattcgttatgtagaaattgaggtttttggtaatattagtgtttttatgagtttgtttattggttagttatattggatgtttaaagaggttaggtagcgtttgtgaggaagtacgtttatatttttttttttttttttcgtagtggtttttaggaagtttaaaggttttgaggtagaggaattttgagagttgatttttatatttagtttagtagttgtattggtcgtgatggatggagaaatgtttttatttggagagtagggattggattttaggaaagttggtttttttgatgtttgggtttggaagggtttggtaaggttttttatggttttgtagttgaggttattgttatggttttgttttttcggtttgtagcgtgttgtttgaggtgtgtttatttgtatttgagtttgtaaagttagtagataagtgtatattaagttggtagaggtttttttttgaggagtattacggtttatttttgaattagtttaaagttatttttggtttggaagttgatttttttttatttttttttttttatttatttcgtttttattattttttttttagattttaagttatgggttaggggtagggtagtttttgtttttgagttttgggaaagtttttagttttttagaaatgttcgtgtaaaggaaaaggatttaatatttttcgttattaaaaattttagtgtttatagttgatttagagattttttttttttcgttgggtttttaattaggttaatattttatttatttgtgtttagtgacgggttggtttttatttttttttattattaggttacgtttttatataagattttatagtaattgtttttatagatagtattaagggaaaaattttttatttggtagttaaggttttttgcgatttgattttgttttttttttttttatcgttttttttaaattgatttttttaggtttttggagtatgttttgttgtttttaaatttaggttttggtttttttttttttagttaattatttaaggtttagtttttgttttttttttaggaagttttttttgattgtttttgttgtttagtagagtttttgttttttttttaatataggggagttttgagttgggagattgtttttaataagaaggttgtagataggatgtagggaggaaggtattgtgaatttggattaataagttttagagagttatgaattttttggaaaattgtggtaaaattgtgtgtgattgtttaggagaatatatttggaggagtatttgtagtttttattagtttttttataggagtttgtttagatgattgttaagatgattagtgatttgttttataggtggtgatatttggttgttttagatttttaagtttagaaaaataaaagttttggtttaggattacgtttatggttagtgggggtaagatatttttttagtttagagtggatgattttagattgttagtttttgaggataaagattaaggttgatatttatgtgtggtcgtatcgttttttaaacgtattgtaattgatggggggtttaagggaatagtttgtattgtttgaaagtgaggtttttaggcgggtattttattttggtgataatggttttttcgcgttttgtaggtttggttttagaatcgaagggttaagtggaggaagcgggagcgttttgggtagatgtagtaggttcgaatttatttttttattgtatatgagttgtttttttttattcgagttgagaattacgtttaggtaagtttcgttttgagttgtcgttatcgatttttagtttttggtgttttgagaatgagttttttggaggagagtttaggtatttcgagatgatttatggttttaggttgttttttcgttttattttaggggtgtgtttgtttatattagagtgtgggaggtttagggttaatttatttaattaattattgaattaggtttggttgaattttagggaagggaaggttggggtagtgagaacggtttttttttttattagttttggttatttttgttgtgggtatcggaattaaggtaggtagaaggttattaggtttttagatatcgttcggagggtttttttagaaagcgagttttgaaatttttaggattcgtggttaagttggaatgagtttgggattttgagttcggggatttaggttatttttttagttttaggttttttttattttaggtaagttttaaatttttgagttttagtttttttatttgtattttggatatggtaaaagtatttgtttagttttgttgttaggtagttgtaaggtttaaatttaattatgtaaaagtattttgtgaattgtatagttttaaaaagtttgtgtgtttgtgtttagtttttggggttttgtttttttttttttttagagtattttttttaggtgtttgttagttagttttttgttttagtgtgagatgtaagggatgagaagtattgagttatattaggtatatgggatgtttagagagatgtgtttttggttaagtttaagtttttttttgatttttatttagtttgtttagtagaagcggttgttttttatttgtttaggttttattttggtatggtttttattttagtttttaatttggttttgtttagtagttagttagtagtacgggcgtttttgttttttttatttttttttgatttggttttgtgttagtaaatggtttttggttttttaattagattagttttttgtttttttttttttagtttaggatttatggggtaggagggtagggtataggtttggaggtgaggttgaggaatatggggtgttttatataggtattattagtattagttcgtattatgtttttttatttttttttttttttttttttttttaaatttagtttttttttgtttttttaggatggaattttagttttttttttggttttgagttttgttgtttgagcgtatagttggagggagaatttaatatagggttttgtttattttttttatttttattttatttatagtattatatagtgtgtgtttagattttttttgagagggggtgatggaggttaatcggtttttttttttttgtatcgtagagagaaatgcggttttttttaggatgggggttgagttttttttttttgttttaaaatgtttttttcgagtgtgttttagatatatgtaggagggtaggttagtagaagtttatatgaggttattaggaatttcgtgtgtataagttgagaggttttcgggttttttttatattttaattttatttttttatacgtgtttagaaggtagaggaagatgggagttttaggtgaacgttggggagggaagggaagtttagtggtatagatggaagataagatggttaatttatttttgtatatgttttcgtttttttggtacgaggaggttcggttttagatttggttgtttatttttgaggtagttttttttattttgagttagttttgaagttttttagtttaggttttggaattttagttattgatttttggtttttgagaggtttaggtttttgtcgtttattttatttaatttttttattttttttgttattggtgggggtttaagggaatttgcgaggttaaagtttttcgagttgaggtttgtttattttgtttaggtgtttatggatgtgaggggtttggggaggagttggaggtgaatgagatatagttgttattcgtagatggaggttaagtttatagttgagtttaaaaataggaagttagttggggggtgttggggtgttatttttttattggatttttaatgaagtttgaggttattttttagaattgaatttttttttgttgttagtttggttttgggaatagagatgttaaggtgtaaaagttatttttataggggtatttggatgtttattaaggttaaatatttaagaggggttttatgggaaggatggatagtgaggggagaggtgttttgggggaaggggcgagttttttttatattatatttgttcgttagtcggtgatattttttttttttttttttagatttagaattcgttttggttcggtaataacggggttgttttattagtgttagtttgcgtggttttttgcgattcggtgtttgtttgtatgtttttttatgtttatttttttggttttggggttagtagcgttatcgattttttgagtgtgtttggggttggtagttacgtgggttagacgtatatgggtagtttgtttggagtagttagttttagtttaggttttaatggttacgagtttaacggcgagtcggatcgtaagatttcgagtatcgcggtttttcgtatgaaggttaaggagtatagtgcggttattttttgggttatatgatagggtatttttgtttcgtttttatttcgggatattatgggttacgtttatgttttttaggtttttagttttttattcgattttttttttaggaatttggtttgggttaggggtttgatttttagtatttttagtcgttttaagtttgaggtttcgtggattgttgggagggagggggtagtaggtttttggtttttttttggtattgaggttttgatttttgttttcggttataggtagtggagaaagttaggtggttacgttttttagtttcgtatttatgataagttgaaagcgtttttttgttttcgtttatttttttgttttgtttagttgattatgagttaatgttagatttttatgtagatttagtagttttattagtttagttttgtttatttttttcgtttttagtggggttttttggttattaggtcggtggttgtgtgtttgaagtataggttgttttgtagagttagttttttgtttttttatttttttttttttgaaagtatacggaattcgatttgttggggttaaggcgttagtttttattttttttcgaatagtgacgagtttgatagagtttggttgattgtattttggttgttttttaggttggatatatttggagagagtgggtagaggatgataggagttggagtcgaggatttttgttgttatttagtaatgttagtttttaggggagatacgggttagttttttattggatattataggggaggagttagatttgagggaggttgagaatatagatgttataagggtttttatggtgttagaagaaggaaaggttttgggagagggggaggtattcgggtggggcgtgggttcgggtagttttttcgtttttcggtttgtttggtatttggtatagcggggaggtttgggtagttttgttttttatttagagtttagttaggttttttttaggaggatgcggaggggttcgttttttttttgttttattttggtttttttttggggttgtttagtagtgtttcggtatggaaggatttataatttcggaatatataagttagagtttgggggtcgggtggtagagggttaaaagttgcgtgtaggttttgttagaggacgtgtggttatgttcggtttttaggttttgttatggttttaaattgattgttttttttgttatatttgttagtgttatcgttgtttagagttttttacggtagatgggggttttgtgtttttttaggtattaggaggtgttgtttttttttatatagttttttatatttcgtttttatattttttttatagggattaggattttttgttttttttttagtttgcggaagggtttttggtttgggtttttcggtgtggttttgttattgtaaatggggttgttaggatgtttttttgaaattaggttttttgtttttaggaagcggggttttgtgtttgtttgttcgatttttgtagtttgggtttggttttgagttttagtttttattttagttgggagtatatagtaatcgtttagaggtaggtttgttagattttaggtggggggtttttttagtaggtagcgtttcgtattgaagcgttcgttttttttatttttttttttgatttttgttatggagtagggttaggtttattatgtttagggtcgtggatatagaaaggttttttgggttgggcggagggtaaatttggtgttgttgaatgagggtttttggggttgggggtgatagtttttcgtttgtttggtgtttttatttgttttagaaattaggttgaggaagggtttggttgtggttttttttaatgagttagatttttttgtgaatcgtagttttaaaatggattttatagaggtgaaagggttttggatattgaattaaatgtttttggaggtttggttttaagtgttttaaatatttgaggatttggagtgatttttgggaagttttttttagttttgaggttcgttgaaatgatttagatttttttaaaatttagttagggaaaggaagaatttaaggttgggaatagtttttttattttttttttttttttttttgaaatgtttatggttgaggaaggatggggaaggaaggaatttttattttgggttttttttatttatgagagaattaggataaagaggaggagagttaggtagttttagagtgggttaggagggagagtaagggaattaggataaagaggaggatagataggtagttttagagtaggtagggagggagagtgagagttttaagggggttttttcgtagtggttttcggtatttagtttttttatgcgtttgttttttggttgggttagatttaagttaggtaaattttaatttaaaagtttgagaagaaaaggcgtttattagaagattttgtggttatggttgtttgttttaatatatttaggaagtgtttaggattaaatatgttaatgtgaaatatttttgtttatttcgttaaaggtagttacgtattttaggtttgttttttgtggtttggtttagtttttgggggttatttaattatattaagtatgataggattatcgagttgggaggaagtttagaaattttttagttagtttagtttttttataatagagaagattttggtttagagtggagatatgattgttttgatttgtatttgttttgagattaggttgagagaggagtttgggacgtgttatttagggtgtgagggtttgggtttcgttggtattaggggcggtcggtgttgtatggagtttttttttttaatgttttatgggtatttatttagtagtttagttttttagaagagaattttggggtttagttttttttaagataggtggttaggtttaattttttgtattgtagagtagggggttattgtcgtgttagtttttaggatgattgagtaagttagggtagttgtttaaggttatttggagttaaagtttatgaaggtaggtggagagaagtatttatttgttacgtggtttattgttatgcgaataagttaagagaggtgaggattttttttggatatttgtttaagattttaatagagatggtaatttaaaaataaagtcgtgggtagtcggtagatggatgggtagtttttttatattgatagtttttagtttttgttgggtataggttttagtatggtaaggtttgatattaaggtgttgttattgttttttagatgttagtattatttttggggtatgggagcgagggttttggggggtatatagagaggtttgtttttaaggttgaaatagtatttggaggatatgggtttttagaattttttttgaatttttttaattatatttgatttttagcgtttattatcgtgtttttagtttcgggaagtacggtggttaggttagtttaaagatattgcgatggggtaggtgtagtaagtgtggggtgggtttttagtatatatagttgtgattatattggatttagtttcgtgttttattttttgttatttcggttgggtagacgagggacgtttttatgaaaattacgtattttgtttatgtagttattttttttttgggttagatagtggggggttattttcgagaatttgaaagatacgcgggggtttttggtttgttttatggtttttattgtttagtgtaaaggtaaataggtttagttgggggaggatggttggtaaattggtttttaggataatattttgtgattatttagttaaaaaataagaaggtgataatgatttattaattttattttattttttttaggatgttgtagggaggaaaggtgtttttatgatttaatttcggtttttttttttttttttttttatttatatatatagagttaggtttttatattattgattttgaaggatagtttttaatgtttaattatttgtttaggtgtgtagtggttgaaaaaagaaagttgagtgttagaaggaatatgaattttaatcgttatttattgtttttattgtaagatattttaattttgtataaatgtaattttttttttagtttaatggtttggggtggaatattaaaaatatatattaaaaatatagtaaaaatttagaaaaatgtaaaaaaaaaaatgaggtcggttttataaagttttattgtttatattattatgtaattatattatagtaaaatattaaaagaaacgtttttgttttttaaagtaagttattgtatttatattttttttgggagaggaggaatacggatgggaaggagatgtaggggtttaggtatggggtaaaatggagtgtagaggtagtcgggtatttttagaatattttttgttggtttagtttaaattgtttggttgttgttatttgtaataaattttttttttttttttt

SEQ ID NO: 5 - DNA, 221909 bp, Artificial Sequence
  chemically treated genomic DNA (Homo sapiens)
aaaatttcgtttttattaaaaatataaaaattagtcggttgtggtggcgtgtgtttgtaattttagttatttgggaggttgaggtaagagaattgtttgaattcgggaggtggacgttgtagtgagttgagattatgttattgtattttagtttgggtgatagagggagattttgttttataaataaataaataaattaggtgcggtggtttatatttgtaattttagtattttgggaggttgaggcggggggattattttaggttaggagtttgagattagtttggttaatatggtgaaattttgtttttattaaaaaagaaaaaaattataaaaaaaaaaaaattagttaggtgtggcgggtatttgtaattttagttatttaagaggttgaggttggagaattatttgaatttgggaggtagaggttgtagtgagttgagatcgtattattgtattttagtttcggcgacgagggtaaaatttttttttaaaaaataaaaaataaaaataaataaataaaaataaaatttgaggtttaaataattaagtttcgtgtatttttttaattttttttttttttttttaattttaattttatgatagattaagttttatgtattttaaaaatgtgtagaatttttatttttagtttttttttttttttttttgtttttttttttgattttttggaatcggaaggaaaattcggatatttaggaattattatataggaggtatttatgtgatgtgtttaatattattttacgtaggtgtttttgggttttgggtgtttaggtttttgtgaattgtgattttaggtagaagcgtgagtattcgtagaggaatttatttatttaaagttagggaatagttagggttggtatttttagggtgattgtgttttagggtatttttgatttgtgttgagtaaaatggataaagttagtaatgtatttataatttagatttttgagatatcgttggattttgggaattttaggtattaggttcgtggtagtgttattatggttaggttgggggtagtgttattatggtgtttgttggttaagttaggatacggtttaagtcggaatttgttggtgttggtataagcggtgagtgggcgtgtgggtgggggttgcggttagggtgtggatattttagaatttaggacgttgtttataattcgtttatattttttgttttttttttttatagtatttttttttcgaggttttttgagtttttaatttttagataaggaaaggggtggatttagttgaagtttagtgtttatttcggtttaattagttttatttggggtgaggggaaatttttttggttgggttgttttttttgtagggttgtggttggatagattatttaagaaaggaagtaggtgggtcggaacgaatttacggtgttatataggttttcgtttttatgtatataagttttttatatttaggtaggaaatgaaaatgttttttggatttttaaggagagtaaaggagaggggaagaggaggaggatttttcggggttgttagtgatatttttagttttttgtgtatttttgggagggttgtaggagaaggtaatgttgcgtttttatttagaattagcgagcgttttttaattggtttttcgtttttttttcgttttttacggtttttattggtagttgtgtaagggttcggttttgtttttgtttttttatattcgttgtgatattttaggttttttaggtttcgttacgtttttttttttttcgggaatagttgttttttattattttggttgtttggttaatttttgtttattttttaaaattttgttttgatttcgttttaataaaattttgatattattttttagttataattagttatttttttttttgtacgttggaaatatcgttttatcgtggagattttaaggatatttaagtagagagaattttttcgtgtaagttttgtatttttttattattgtttgcgttattcgagttgtaaagggcggttttttgtgtttgtttcgttgtatcgatatatcgagttgcgtacggtgtttagcgtagggagaataaatgattatttgtttaacgcgtttatttataggtgaggaaattaaggttttaatttaatcgacgtattttgtttttttgattattagaaaagtagtaggataggtgttttgtttcgttttatttcggtttattaagtcggtatttcggtttcgattttcggttgtgttcggcgtcgtcgcggtgttcggcgtcgtcgtttcgttcggcggggtcgttcggagcgttcgtattttcgttcgtttttatttggtcgggttcgtttcgttcggattcgggattgggaagtgcggcgattttcggaattagttattggcgttagcgcggggagttgggggtgtagagttgcgggcgcggcgggttacgtaggcggtttttattttcggtttggtttggtttggtttggtttgcgttgtcgcgcgggggcgtttttttttaggttcggcgttcgttagtttcgtttcgttaggtgtagcgtagcgtaggggtgggcgggggtggggttcggcgcgtacgtttacggggcggggagggggcgggttaggggcgggattatagtcggttgggtcggggttttatgcgtattttcggggaggggcggggcgggggcggggtcggggcggggttcggtcggtgtattttagacggcgggtcgtttttttttttcgtttttttattatcggtttaggattagcgttttgggagcgcgcgtttcgttgtttcgtcgttatatttttttgggagcggcggttacggaggtattatgaagaagttttatttaggtgggtttcgcgttcggggtggggaggggtcggtgtttcgggattagcgttgtttatttgagtgtttgcggtcgggagtggcgaggcgttttcggagttgagcgagttttcgcggcgggtatattgtaggtcgagttttttttaggatagggtcgttgtcgggtcgttttcgatttgagtcgatcgttttttgcgttgtttttagtttttgttcgagtgtcggaggggttgttttgggggacgttttttttttttcgttttttgtattttcgtaggaatcgttgattttttaggtcggtcgggtgttttgggtttttgtgcgtttgtgtgggtgaatggggtcggggttaggtggaggggtgtttttgggtttagtttttagggttggtggtttaggtcgtagtatttttttttcggatttttttcggttttttttttatttagtggggtacgggacggtttttagatgggatcgtttagtagcgtttaaatttggcgattcgggtttacgttttgcgtttaggacgtcgttcgcggttgatatttttattttattttagtagggttcgttttaagtaggcgaagggggtttgatttgggttttattatgagtcggtttaggagtttttattttataagaggttttcgttttggtattttgaagttttattttatagatgggtatatcgaggttataagggtaggttaagagaaatttagatttttattatttgtttttttttttttttttttttttttttgtggttttttttaaaggatttaggtaggtaggattttttgttttttttagtttttaaattataaatagcgtttttttttttaaatttagaaatcgtttgtttaatgttttttttttaatttatttagatagaaaggtatttgttaaggatttatgaattaatttttattgataggagaatagaattatgggttttagttggaggtgaaggagttatcggggttatttttttgtttttgggttattgtcggttttttttggttttttatatttaggaattaaaatgagtgataaagtattttgttttaaagaggattatttagaattttttcgaaaatatttttttgggttagtagtttagaattttaatttttattcggttgttgcgaataagatggttttttacgtattcggagtatagttttgttaggagcgtgggtgggttggtgtgttggtgggcgggagcgggtttttaggtggtatatgtttggttttggtatcggggttttttttttaatatgttttaaatatttgagattgttgtggggatcgcgcggtgtatggttttttttaggggatttttagttcgtttagggagggttttttgtttttggttttttatattttattttttattggtgggtttagatagtgggggtgatcggggtttttttaggtcgtgggttttgggttttttttgcggagatttttttgtatagatgtcggaagggttttgaggtaggtttggagtttttgtatttgcggtttattgggaggtggggagattattatttgtttttttttttttttttttatatatatttattttattttttattgggttttttttttttttttttttttaaaaaaaaggatagaattttttgtagtaggtggaagtagagtttgtggagtgagtaggaattaatttttgtatagtagtttcggtgtttttttgtgtttatttaaaggggtaggtttttttgaggatgggggaagggagggtttagattatttttggtttgttttttgtttggtagtggtttaaggtgtgttgggttattgtgttgtagttgtatggagtgggattggagggggttgatggtgggggtggttttttgtttttattttgagtgttttggagttgttttggtattagttttttttcgggtacgggtattcgtaggagttaggttgattttttaataagttatcgatattatgaaattaaggaaagtagtaaaagatgttaaaaattttttaaggttttgataatttaaggataataggaaggtttttatttttttatttagattgtgcgggattattgtttttagatttgtatgtgggttttagaataaacggaatgattataatgttgttttcggtagatttggtttgaatattcgtgagtttttgaaaaggagaaagattttagaaggatgtgttggggtaattttaagtatcgtgggtttatagatagttatcgaagatattttatgtgttgggtatatatggttaagtttgagtgggtatagaaatggtaatgagatatagtttttgtttgtagagaatttatatttttatcgggagttaggatgagggcgagatattagtttattaatattttttttttttgagtagtttagtttttaaatattataggaatgtttcggaggttttaggtggaggtgagattgagttgggttttgaggaaggagaagttttgagtagtggagaataaaaagggatttggttaggtgcgtttgaagttttagttatttaggaggttgagatacgaggatcgtttgagtttaggaggttatttaggaggttgagatacgaggatcgtttgagtttaggaggttatttaggaggttgagataggaggatcgtttgaagttaggagtttaaggttgtagttttgtgatagcgtttggaaatagatacggtattttagtttgggtggcgttatgagattttatttgtaagaaggttttttttaatgcggaaggtagtaagggtttatatagggtagttgtaggatttagggggatattggggataggttttttttggtagttttattgttgttttaggttttttcgattgttttattcggttttttaatggggtggaggtagtggtagtttataggtagtgtggtttagtggttatatttgggggtttagagtcgttagttttttgggattaaattttattaggttgcgtttttttttgtggtataaggtttttattttatgtattttatttgttttatttgtttttttgtgtgtgtggtgttttttaattttatttatttatttatttttgagacggagttttattttgttttttaggttggagtgtaatggtatgattttagtttattgtaattttcgttttttaggtttaagtgatttttttgttttagttttttgagtggttgggattgtaggaacgtgttattgcgtttagttaatttttatatttttattagagatggggttttattatgttggttaggttgatttcgaatttttgatttcgtgatttgtttgttttggttttttaaagtgttgtgattataggtatgagttattacgtttagtttgttttatttgttaaatgggatagtgttatgttgttgtaaaggttaaacgagtttatatttgaaaaagttgagaaatgtttgttttgtaatttgttagttgttgttatgattatgattgttattgataggaggatggagaaggttggggttacgttattgttaggacgttttagaagtttttatgatttttttttattgtggttagagtatggtgtagggttttttttttagttttttagtattggagttagttgtattgtattcgttttggttttttaggttttgagttttgggattttttttgtatattaggttatatggaatttgtcgttatttttaggtttttttggaaattttttgtgggtggtagcggtaggaggatttattcgaggtcgatgagttatagaagcgggattgaggttgcgttatatttttattggtatttgggaattattttggagattttttttttattttttatttttttgagatggagttttgttttgttgtttaggttggagtgtagtggtacgatttcggtttattgtaatttttgttttttaggtttaagtaatttttatgttttagttttttgagtagttgggattataggtatgtgttatcgtgtttagttaatttttgtattttttagtagagatggggttttattatattggttaggttggtttcgaatttcggattttaggtgatttattcgttttagttttttaaagtgttgggattataggtatgagttatcgtgtttagttattttggagtttttttgtggtttttaggagatttttgaaggggtattagttacgattaaaaagttttatgttgtcgtgatttttgagttttgggtagggagggaggttgtatttatataggaagtagtttttgtcgtgatttagtgtgttggttcgtcgtggtggatagggttgtatttttatttagcgtttcgggagttgatttacgggaagggtaaggaattgtatttttagagaatatttttttagttagttaattcggtgataggcgagcgtgggaagggtataagtatagggtttttttttttttttttttagtttcgttttcgcgtttgttttcgttgttttttgtttttttacgtttaagtttgtttgttttggcgtatttaggggatttggattggagagaaaaagttatttcgtacggttagtttgtggttttgtttgatttgtgtttttcgtcgaggttttttagttgtgagatagttggttgagtttaagttttggggttagttttttttttagtttgttgtaaaggtagaaaggtatgtttaggtaggggttatttgttttgttcgtttacgttagatcgtaggtatttgttcgttagattttttcggtttgtttagagggattttgatagtcgagggtaatgtatttggtagcggagtattgcgtttgcgatagtttattttttttttggaattattttttataagtgtgattagtttaagttaggataggtatagggggatttaggattgttatttaggggtagtggtttggaatttaggtttaggtgatatgggagttaattttttgtttggagattttaggtgggtgtttgtagaggatattttatttgaggatttatggaaggggatattttttattttttatttggtttttgggttgtttttttttgatatttttttgttattttaggtagttttgatagttttatgtgattgggatttagaggtggtttttgttttcgttttagtgtttgtttataggtagtgttgcgtgggttttgaagtttgtttaagatggatttgataaggggagtttagtatatattagtgtaggttcggttagggggtgatgatggtagtttttgggtagatttagttggttttagggtaggaggggttttagagagaggttttaggtttttaggggtgtgaatttttggggtgaggcgggaagtgacgcgttgggtttttgcgtttttgtttgttggagttattattttggaaatattttagttttaggcggttgttagggatttatggggattagtgggtgttaatttttgggtgaagttttcggggtttgtatatagtatatagcgttgtggttttatggtttattttgttgtgtgaagtggtttagttttcgggagagtttttagttaggtaggtttgacggtaattgttaggttatggtgatttggaatcgttgattaaagggagttagttttggtgggtggagggatttggtgggtagttatcgtgatgttaggtatggggatcgtgtgttatttaggtttgtgggtgtcgagtttttgtgggagtagtgaagtgttttcgtggtcgatgggttggttatttttgttttttttttgatgtgatagttgtgtttgggtttcgggaaatttgttaggaggtttggtattggtttgttttattggagcggttttgttgagttgtgagttgttcgtttttttgaggtttttagtttattttaattttttatgtggatttggttatttattttagaagcgtttgtcgggcgttgttgagtgttaggttttgtttgtttttttttttgtacgttggaggttttgggtattagttttgtagggtggtttggttttgggtttttagggtagagtatggtattttttgtttttagtttagtttttttttgttttatttttttgattttattttgggtatgggtttatttgtagtttttgtgaagggagatattgagttgttgttggtagaggaggggcggtttttgggtattgtttgttaatggtttttcggtagttttgtgatagttgagttttgtttttagtttaatttgatttggttttttaaagtatgattgttggtagtttgaaaatttttaggataggaaataggagtggcgtagggaatgtaagatgattttagttttaagttattgggcggtttttagatttaggttgtttgttgtttttggtaggaatttaagtcgttggttatttttagagcggtgttggttcggggtttttagtggtttttgtgtttgggtgagaggaattttggatggttattttgttttgagtgtgtgggtttttagaagtgttgggttagggggtacggagggttagaaagttttttttggagcgttggattttttcgttgatttttattttatttcggtttggggttttagagaaggggtttaggtaggagtgttatttttttttaatggggatgtggttttagtttttgtttaggtgggtgtattgtttttttttcggttttttttaggttgtttaaatgatttgtgacgaggtttgcgttatggtcggggttttttgttttttttagcgttgtatttgggaattaggggttgggtttcggaagtcgaggatgtttttgaatgttatgtttgggtatttgttttggttaggcgaggcgtgttggggtagcggttgagatgggagtagtagtattgtttgttaggtttgagatgggtttcgggtgagtgtggttattaggaagggttgggtagagtaggcgggtgggtcgtttttggggttttgtttcgtagattaatttgattcgtattttggggtcggggtttttttttatagtttttttatgaattatggtttttgtttttattttaaattagattttagaagaggaataatgtttatgtaatttaagttagttggaagtgggttatatttaatttttgttattttttagtttgttaaggatttgattaatttaatttagagggatttggagggttgtttgtaaaatttattaataatagggaattttagttttgtagttatagggtttatagaggtgtcgggttgtcgggttattgttgggaggtgagtcggtggcgtagatattatggaggtatcggtagtggaagagttgtaagtgtatatagaggtcggtatcgaggggcggggaggaggaggtggtggatttttcgttagtgttggtattatgttgtttttagtattagagatttaaggtgtggttgattttggttggggcgatgagttattggatagtagagtttttttggtagttgggggttaacgttttaattgtcgggattttgtattatgtcgttttttttttttgttttgtttggtttggtttggtttggtttttgagacggagttttattttgttatttaggttggagtgtggtggtttaattttggtttattgtaatttttgttttttgggtttaagtaatttttttgttttagttttttgaatagttgggattataggtacgcgttattatgtttggttaatttttgtatttttagtagagatggggtttcgttatgttggtcgggttggttttaaatttttgattttaggtgatttatttgtttcggttttttaaagtgttgggattataggtatgagttatcgcgtttagtttgtatttatgtttttttttttttttttttgagatggagtttcgtttttgttgtttaggttggagtgtaaaggcgcgattttagtttattgtaatttttatttttcgggtttaagcgatttttttgttttagttttttaagtagttgggattataggtttgcgttattatgttcggttaattttgtatttttagtatagacggggtgtttttatgttggttaggttggtttcgaattttcgattttaggtgattcgttcgttttggttttttaaagtgttgggattataggcgtgagttatcgtattcggtttatgttttttattattattatttaattttttaaggaaagtaatttaaattgtatattgtatttttttttttttttttgttttttgttgttagttttttgtattatttattgttaaataatatgaataggaaattgaaaggaaaattttaataattattggttgtagtattttttttgtgttttatttagtgtttgtttttttaggaatatgatatagggtttgatttaattatgaaaggcgtatatttttagagttttatattttttatagaatgaatgttgaattttgttttttttatttgaaattagattttaggtatggattttatgattattattataatggttttttagagtggatattgtattttgtagggaattattttttttttagttgttggtgtggacgtttttttttgatggtgtgggtttgggtttttgaagggtggtgttttgagtaaagatgttatagtagttatgtttatagttttgggtttggggttaggtggagattggttttaattttagagtttgttgttttaaaataaatttttttttttttttttttgagatggagtttcgttttgttgtttaggttggagtgtagtggcgcgattttcgtttattgtaagtttcgtttttcgggtttatattatttttttgttttagtatttcgtatagttgggattataggtattcgtttttacgttcggttaattttttgtatttttttagtagaggcggggttttattatgttagttaggatggttttaattttttgatttcgtgatttattcgttttagtttttaaagtgttgggataaaataaatttttagggtcgggagcggtggtttatatttgtaattttagtattttgagaggtcgaggcgggtagattataaggttagaagatcgagattatggtgaaatttcgtttttattaaaaatataaaaaattagttgggtgtagtggcgggcgtttgtagttttagttattcgggaggttgaggtaggagaatggtatgaattcggaaggcggagtttgtagtgagtcgagattgcgttagtgtattttagtttgggcgatagagtgagattttgttttataaataaataaataaataaataaataaataaatttttatatttatttgtattatttattattattattattaaatagggttttgttgtgttgtttaggttggagtgtagtggcgtgattatgattttttagtttcgattttttagttttaattggttttttttttttagttttttgagtagttgggattataggtgtgcgttgtatgtttggttaattttttttttttttttttttttgagatagagttttattttgttgtttaggttggagtgtcgtggtgtaatttcggtttattgtaattttcggtttttggattaaagtaatttttttgttttagttttttgaatagttgcgattataggtatgtgtcgttatatttggttaatttttgtatttttagtagggacggggttttattatgttggttaggttggttttaaatttttgatttcgtgatttatttgttttggttttttaaagtgttgggattataggtgggagttatcgcgtttggtatgtttggttaatttttaaaaaatttttgtagtagtcgggcgcggtggtttatgtttgtaattttagtattttgggaggttaaggaggtcgggagttcgagattagtttgattaatatggagaaattttgtttttattaaaattataaaattagttgggtatggtggtatatgtttgtaattttagttatttaggaggttgaggtaggagaattgtttgaatttaggaggcgggggttgtagtgagttgagatcgtgttacggtattttagtttgggtaaagagagtgaaatttcgttttaaaaaatttttgtttttgtttttgtagcgatagggttttgttttgttgttgtttaggttggtattgaatttttagttttaagcgatttttttgttttagttttttaaagcgttgggagtataggcgtgagttattgtgtttggtttttatttgttttggttgtttttttttgttttaggtaattatatatttttttaggtaattaagaaaagattgcgtatgatgagttttttttttggtatttttgggattgtttttaaaattagataagtgtttttattttgatattttattaagattttaatgaatagaatgtcgtttgtttttagtttgttggtttttttgcgaaggtttagggtttttttgtttgaaaagttatttttttgtcgaggtttttgatttttttttattacggtagttatgtcgagggtttatagagttattttttttttatttttttttcggttttttaagacgtatttgtattttcggagatgtttttttgtttttttgggttattttttttggtcgttatttattttgttgatttattatttgtgtaatagttttttttggaatttttaggtttttgttatttattttttgtagttttcgttttgttttttttgttttagtttttttttttattatttttttatttgttggtttttatttttgtttatggtatatttttgtgttatattttgatggttggataaaggttgagtgaaacgtatttatttttttggtgattggggtgtttattaattagaagggatttaaggttggcgtagttttttttcgtattttggggtatcgttttgtggtttttttttgttggagtttgtagttttttgtttttttttttttaaattttttgagatggagtttcgttttgtcgtttaggttggagtgtagtggtgagattttagtttattgtaattttcgtttttcgggtttaattaatttttttgttttagttttttaagtagttgggattataggcgttcgttattatgtttggttaattttggtatttttagtagagacggggtttttttatattggtcgggttggtttcgaatttttgattttaggtgataggttcgcgtcggttttttaaagtgttgagattacgggtatgagttattaggttcggtcgttgagattatttttataagttattaggtttggttgtagttggtagtttttgattattggtttcgttttacgtgatttgtgattttttttttggttttttggttttgttttgtttatttgtttattttttttatgtatgcggtttgtttatagggtatgtaatggggtttaattaggaaatggaaatcgtttgagtatttatttatttatttatttatttatttatttatttattttttttaagataaggttttattttgttacgtaagttgaagtgtagtggtgtgattatagtttatggtagttttgaatttttgagtttaagcgattttttttttttagttttttaagtagttcggattataggtgtatattatatgtttgtttaatttttttttttatttttgtagagatagggttttgttttgttgtttaggttggttttgaatttttaattttaagtaatttttttgttttagttttttaaagtattggagttataggtatgtgttattacgttttgttaatttttgtattttttgtgtgtgtgtaaagataaggttttattatgttgtttaggttggttttgtatttttgggtttatgtgatttttttgtttgggttttttaaagtgttgggattataggcgggagttatagtgtttggtttatttgagtatttagaatagaaggatttaaaggcggggaattagttatatagatgatgggagaggtgaaggttagatagggaatagagaggtaattagtaggaaattaaagtggtgtgggtttatatagttttttaaaggtatggatgtaatgatttatttagaatgagaaaataaataatagtaaattataaattataagtagttgttaaatattataaatattattatatgtagaagagtattagttaattgttagttatatttttaaagttttattttttttatatttttggtattatttttttaatatgatgattttgtaatatcgttttttatttcgagaatagaaaattgattaggttggatatagtggttcgtgtttgtaattttagtattttgggaggttaaggtaggtggattatttgaggttaggagtttaagatcggttcgggtagcgtggcgaaatttcgtttttattaaaaatataaaaattagtagggtatggtggtatatatttgtagttttagttatttaggaggttgaggtgggaggattgtttgagtttaggaggtcgaggttgtagtgagtcgtgattatgttattgtattttagtttgggtgagagagtgagattatgttttaaaaaaaaaaaaaaaataataaaaaaaaatataggttgggcgtggtggtttacgtttgtaattttagtattgtgggaggttgagatgggcggattatttgaggttaggagtttgaaattagtttggttaatatggtgaaattttatttttattaaaaatataaaaaattagttaggtgtgatgacgtacgtttgtaattttagttatttgggaggttgaggtaggagaatggtttgaatttaggaggtagaggttgtagtgggttaagatcgtgttattgtattttagtttgggtaatagagtgagattttattttaaaaataaataaataaataaagcgaatgaatttttttagttgattaaattttgtttttatttttggtagttgggatgtatataaaagtggcggttaatatggagttggtggtgttgttataattgttttgtttaagatatataggaattttggtaaattttgtttttttttttttttttaaatgtgatttttattaagaaagaagtaggaaaatgggggagatttttaattgtatatgaggtatttgtgtatgtatttttgattagagagatttttttgttttgattttatattgaaggaattgaattttttgtttataattttatttttggtgatgggagtaattttttatagatttgtttttggattcgtgtattttaaattttgtttttttttattgcgtacgttttttcggcgttaggtatcgtaggatatgttcgtgttttgtgatttttgattttgcgcggtaggtggaattggaacggtgagtggagcgagtattgttggaattcgtttttatatcgggatagcgagtagtaattgaattatatatggaaataaatgggaattatataaatataattcgattaaagttaaattaaatatttttttagtttaatttttttttagtaggagtttttacgtggtagtaagttttcgtttttattttatataagagaaaatgtgacgggtaggaatttaagattggaaatgaacggggacgttaattgattgtagggaaaatattttttattttgtaaattttataaaaaatgtttgattttgtggatatgtggttagggttttttttagtgttttgagagggaattatgtaggtagagggagggtttttagtattgtgggggtgatttggagattggtagtagggtgttattattatttttaggtggggatgagagggaggaagttttgtgattagagtttaggggttagagttatttgttgggagtttaaataaaggtgggattttggtaggagttggaattatatagaggattattttttttgttggagaagttgtttgaggtagaggaggtggagagttttcgcgtttttttttgtttttattttttaggttttttttaagtttttcgttggttgaatttagtttaaagttagtaggtttggggatttggatatttgagttagtagaggtcggcgttttttttatataaaggagggtataagaagtgggaggtacggagggggattaggttaggatttatataggatgtgtaaataggagtttttttttttttttattttaaatggtatttgtagtcggttttatttttttgttgttagataggaagaggaattttgttttcggtattagttgtttttatcgttttttattttacggaggttttttttttttttggtttttgtttgtaattattggcgacgttgatggattatattttttggggagtttggttatgaatatggttttttatttgttgtggattaaattgtgtttttttttttgaatttttgcgttgaagttttaatttttaatgtagttgtaattgaagatagggtttttagggaggtaattaaggttaaatgaagttatagggtaggattttaatttaataggattgatgtttttataagaagagggagagatattagagattttttttttttttttatttgtaaatagaggaaaaatgacggaggatatagtagggaggtgggtataagttaggaagaggggtttcgtcgggaattaattttgacggtattttgattcgggattttgggttttttaaattgagaaatatatgtttgttgtttaagttattttttttatagtaatttggatggtagtttgagtttattaaggtatcgtttgtattagttagggttttttagggagatagttaataggagatggatggatggatggatggttagatagatagataagcggatagagagagagagagataggtagatatagatagataggtagataaatggttagatagataagtagatagagagatagagatagatagatataaataggtaaatagataggtagataaatggatagatagatgatagatagttaggtaggtagatagatatagataggtagatagatagatagatagatgataggttgggtttagtgatttttatttgtaataattagtatattggtaggttgaggtcggtggattatttgaggttaggagtttgagattagtttggttaatagggtgaaattttatttttattaaaaatagaaaaattagttgggcgtggtggtgtatgtttgtaattttagttattcgggaggttgaggtacgagaattatttgaatttgggaggtggaggttgtagtgagttgagattacgttattgtattttagtttaggcgataaagtgagattttattttaaaaagaaaaaaaagatagatagatgaatggatagatagttagatagatgatagatggatgataggtagatagataattgataaatagatataaatgatcgatggataggtagatatagatatattgattaggtagatgatagatggatagatagaagatagatggtggatgggtgggtagataggtagatagatagttagaaagatagatgatagatagataggaaggaatttattaggggaattggtttatattattgtggaggttaagatgtattatagaaggtcgttcgtaagttggaggtttaggaaagttagtatcgtggtttagtttaagtttgtaggttttaggattgggaagttgttgatgtaatttttagtttaaggttaaaggtttgagagtttggggaattgttggagaattgggagttttaagtttaagggtaggagaggaaggtattttatttttaggagaaagagggaatttattttttttttgtttttttgttgtttggtaatggaatggtgttatttatattgagggaggatttttattatttagtttattaatttatatgtttattttttttagaaatatttttatagatatatttagaagcgatgcgttattagttattttttaatttagttaaattgatatttgtcgttagttattatataggtttagaagaatcgtggttgtatggtgatggtttttatttcgtttaaagaagttgaagatgaattgttggtataagttatcgtttttttaggttttttttagtcgtttatttttttaaaaatgtatttattgagtatttgttgtatgttaggtgttgtgataagtattggggtatagtagtgagtaaataaggatttttgttttttggagtttatatgtagtagaaggaaatagaattaatgaatttattagttttagaaattattaaaataggattaagagttgtggtgagaattaagataaggtgattgtatagaaagtgattgatggttgttttggaatgagtggtgaggggttatagagatgatgatagttgagttgagattgggaagataggaaggagttagtagtgtaaggattaggttggaagtaagtttggtgtattttaggaatagtaaggaggttagaggggttgtagtagagtaggcgaggaggaggagggagacgtaggttaaagaggagtttggggttagatggaggattttttttttaaagtttagttattttttttttaaaggagaatgtgttatttttaaaagttatatatgttagtatagtgtttggtttattatatgtttttagtaggcggtgagtatggttgtttttgttattattatattataattattaggaataatggagttattaggttttgtatttatagtaatgtgagggagttagtaagtttttttggggaatttatttttttttattaagtttataagagtttgataattaggttaatgtagtgagagttatagttgtttagtgtattggattttttagttacgggttaggatatttttattttagtagaaatttttaaggggattggggagtgtgttgtggatgtttttgggttatttagattttttggggagttttttttatcgtagttgttgtagggagtttagttgtagtgatgaattgcggtttagttttgtttatgggaaaattttatatgggagatgggacggttttttgttggttttttcggttttaggttgtttttataagtgtagggatttttatttgggtgtgtgaatggggtttaggatgttttaagggtatgtggagatgggggttagttgttttttttgatgtttttgaattttttttttttgtttttttgtattttattgttttttggttttttttattttgggtgttttggaataatatgtaatttaatatataggttgattttattattttgttttgttttattttattttattttggaaataaaggttttgttatttagtttggagtgtagcggtgtaattgtaatttattgtagttttgaatttttgggtttaagtgattttttcgttttagttttttaaagtgttgggattataggtatgagttgttgtgtttggtttaggttggttttaaaagttttttattttttttgtattttgatgatatttattttttggagtaggtttttagttattggtttcggatattttgtagttattattggttagttgtggtatgtgaagttgaggtttaggagaagggtagttttgtttaaggttatacggtttagtgttaatatttagattttagtgtttttattttttttttggtcgtttttatttttagtgtatttttggaggtttaagggagttaaaggttaggttttggttagttaagaatttaaaaaagttgtttttgtgtttttttgttaatttattattttattatttttttcgataatgaatttagtttgaattttagataaataaggattaatttttagtataagtatattttataatagatttgggatatatttatgtttaaaaatgatttattgtttgttggttttagtagtttatgtttataattttagtgttttgggaggttatagttggagaattgtttgagtttaggagtttaaggttatagtgagttatgattatgttattgagttttagtttgggtgaagtagtaagatttttatttttttaaaaaattgttgattgtttatttgaaatttaggtttaattgagtattttgtattttatatgagaattttatataggtgagatttagagttttaatgtttattggtaagtttttgtagggaggttttgtgggtttttggttggtattgatgttttgtgatgagtagggttatttggtaaggtggacgtttgttgtttatgtaggtagagtaaggttttgggtaggtatgagttgattttattttttttagtttgggagttagatattgttggtagtttgtcgttaagagaggggttggttattaagagaggggcggtttttatgggttttttttggtttttggtttttttttagttttttttttattttaaatagaggttaacggtatcgtattagaattagtgtgttgttttttttggttggtattttgtagttgggtagattgttttttttttataggagttggtggtgtttttttcgttttatagggaggatggttgagatttttgattttgatatagggtgttgttttttttttgttttgagatagagttttggtttttttatttaggttggagtgtagtggtatgatgttggtttattgtagtttttattttttgggttttagtaatttttttgttttagttttttgagtagttgagattataggcgtgtattattattgagaataatgttttttatagtgtttatttttttgtaggagtaagtttttaaggtaaggaggttgttttttttatggatgaataaattgattttgatttatagttttacgtgttagttttgagggtggggaaaggttgttttgtgtttaggtagggggtgggggtaaggttaggagggtttggtgtttagtgtatttttttaggatataattttaggtagtagaggttaaggatagaggggaggagaagagggaggtggttattatttttttattttagttttttttggagataagtttgagtattttagttgtttattaagtttggagataagtttggaatttaaatttttgattttgatttagttttttatagtttttgtgagtaaattgagttttagaaaaagggagtgaagtttgtgtattttggacgtttttattttaggtttaaatcgtttttattttaggtttaaatcgtttttattttagtttaaatcgtttttattttaggtttaaagcgtttttattttagtttaaagcgtttttattttaggtttaaagtgtttttattttaggtttaaagcgtttttattttaggtttaaatcgtttttattttagtttaaatcgtttttattttagtttaaattatttttaatataggtttaaattatttttaatttaggtttaaagtatttttattttaggtttaaagtatttttattttaggtttaaagtgttcgtaatttaggtttaaagcgtttttattttagtttaaatcgttttattttaggtttaaatcgtttttattttaggtttaaattatttttattttaggtttaaatcgtttttattttaggtttaaagtgggaaggagttatagggaaataaacgggggaggtacggatgattaggatgagggtttttatgatttatttttttttaggggttattttaagagttttttaaatttttattattttttaatagagatggggttttgttgtgttgtttaggttgatttttaatttttagttttaagttatttttttattttagttttttaaattgttgaggttataggtgtgagttattgtatttggttttttttaggagttttaagaaaaaaaatgggaatagatttgtgtgtgtgtgtgtgtgtgtgtgtgtgtgtgtgtgtgtgtgtgttttgagaaagagtttcgttttgttatttaggttggagtgtaatggtacgatttcggtttattgtaattttcgtttttcgggtttaagtgttttttttgttttagttttttgagtagttgggattataaatatgtaggttgattttgtatttttattagagacggggttttattatgttggttaggttgatttcgaatttcggattttagatgatttgtttgttttggttttttaaagtgttgggattataggtttgagttatcgtgttcggttaggaatagatttttttttgtagatgatttttgttattattgaaaatggatgtttatgtataattgaattgttataacgttttattttaaaaagtttttttttgagaaaatgtgatttttgatagaggagagattgtttaggttttatttattgttagtataaaggtagagtaggggtgtggcggtgttatttttttttgagatagttttatttttgttttgtttaggggtttagaagtttggtttattcgagtttatagaggggtttggagtggttgttttatattataggtggggtttgtaaggatttgaaatgatttttgagaaggcgggtgtggtgggtgtattttaattattaaagtaataataatgatatattaaatagtgtttgtttagattttgagtgtttgtttaaatatttttattttgtgatttgttagattttagtataataatttaggtaaaagaaaaaatagttgggcgtggtggtttgtgtttgtaattttagcgtgaggttaaggtaggaggattgtttgagattaggagtttgagattagtttgggttatttgagattttatttttgaaaataaataaattaataaaagatttttatgttttatgttttttttatatttaggttttttaaattatatgtattggggaaagtttattaagagaagtttttggtcgggcgtggtggtttacgtttgtaattttagtattttgggaggttaaggtgggaggattataaggttaggagttcgagattagtttggttaatatggtgaaattttatttttattaaaaatataaaaattagtcgggcgtggtagtgtatgtttgtaattttagttacgtaggaggttgaggtaggagaattatttgaatttgggaggtagaggttgtagtgagttaagttggtgttattgtattttagtttgggcgatagaaaaagattttatttttaaataaataaataaagggagagaagtttttgggtttttagatatatgggttagtgtttatttttgtaaagttgttgtgtttaaagaggggttgtatttggtggaattggggtaaaagagtagggagggtattgggtagttgatttggtttttattattggaaaggggttgtgttgttggtgttttgagttggttttataaggaagatattgtatagggcgttttaagtttgttttttttgtttaggtttatttttttttttttaggattagggagtttcgttcgttttttgttttcggtatttgttttttggtttgtgagtattgtatttttttttgtttggaacgtcggtttatggtgggttttcggatttttgttttttgttgttttttgttatatttcgttaaagtgtgttttatttatttattgttattattttttgaaatagagttttgttttgtcgtttaggttggagtgtaatggtgtgatttcggtttattgtaattttcgttttttgggtttaagcgatttttttgttttggtttttcgagtagttgggattataggcgaatgttattacgttcggttaatttttgtatttttagtagagatggggtttttttatgttggttaggttggtttcgaattgatttcgggtgattggtttacgttagttttttaaattgttgggattataggcgtgagttattatgtttggttaattattataatattgatattataataatattatagttagataacggtgattaacgtttgtaattcgaatattttgggaggttgaggtaggtagattatttgaggttagttcgagattagtttggttaacgtggtgaaattttgtttttatcgaatatataaaaattagtcggagcgtgatggtaggtgtttgtaattttagttatttgggaggcggaggttgcggtgaattgagatcgtgttattgtagtttaatttgggtgatagagtaagattttattttaaaagtagtaataataataataataataataatattatttattgagttttaattttgtgttaggtattgtgttagtatttgcgttatgtgattttattgattcggaataatttatgagtaagtattatttttgtttttaaggaagttgagatttaggaaatggaagttattttttagggtttatagtaagggtttggcgaggtttgcgtttaaattttgattatttgattttaggtttttttgttttttttgttttttaaaaatttaaatatttttatttgggatgattttagatagttagattttaattgttttttttttttttgagtatgttttattttaaaattatataaagataatttattttttaattggagttacggaatcgttagatgttttggagatttttttagttatttttttgttggatttagatataggtttgaataattaggtttaaggagttgaattggagtcgttcgtggttagaggtttttttttgggaatagtagtggcggtagcggttgcgttgagtttggtaatttgtttaagagtaggggatgtttaggttgcgttcgttttttttttatgaacggtttgttttgcgttttttttgtgttaagggttgttaggtattagatgtttattttaggaaattagaaaaataaatagtgtaaataaaataaaaattttatttaagaaatttgagatagatgttgttttttttatcgtttttttatttttatgttgggtttggagagagtgggttagtatgttttttacggataagaggttttggggtatttaatttggatggaattttttttattttttttttgtttggtgttagggggtagaaggtaggggtggtgtttatttggtttagggaggaggatagggtagtttttgtcgtcggtattttttgtagagatgttttagttagaagtgattttatttttaggaacgtgtgttttgttttttgttgggcggtttttttttattttttattgtttttatagtggggtgtgttagatttatgggtagagttttggtttatttttagtttcggatagtagaatgttttagtagtgtattgatggtgtgtgcgtggggatgtgtggaataggggatagtgatttcgtgtgcgttatatgtagtgcggtttttagtcgggtgtgtgaagggggtgtttatggttatcgtggaagtgagtttagttggggttggagggtttaggtttattgtatgttatttagtagttttgggagtggggtttattttttttttcgtttttttttttttttggttttgggtagtttatcggagttgtattttgggttattttttttggttttaaggaggttgttatttttgggaggtagatgttggtttttttatttttgttttttggagatttgcgtcgaggtttgtttttttgtttggagggattggttaggaatttttgggtttttttggtggggtttttgttgtttagtagtgagtagagtgagtgggtattaagaggaggatgttgggtgaggttacggatatggttggggtaggttgggggtgttggaggtgaatttcgtagttgtgcgattttgggtagtttgtttagttttgggtttcgtttttttttttatgaaatggggcgggagtatttgtttgttggggttgtgggttgggtgaatcggagttaaggtatagtttatagtttgtcgttagattttcgtaagtagaagtgggtgtttttgtttagcgtttttcggttttttttttaaggtttagttttgtttttattttttttatgaagtttttttggttattttaggagttacgatttatattttttttggagttttgtgttatacgtattttttacggtgttgttttttttggaggatgggtttaattaaaattggggtttatttgggggttttttttagtattagagaagtttaggtttagtagagatgggtattttgttaatattagtttcgcgaaggatatattgtgtttattttgttgttagttgttgagtttggtgttttgtagttatggaatatgtgtataggtttgggttgttggatacgaaggttagatgggtagtttattttgttttcgttttgagtttttagaaataagttggttgtatttatttttatttggttatagtttaggagtggggttgtggaatggatggaaggaaggatgagtgggtgggtgggggggtgggtgggtgggtggatggatggatggatgatgggtggatgggttgatggatgggtggattaggtggataggtgaatggattggtgggtgggtgggtgggtgaagggttgaataggtgggttgggtggatgggtggatggatgtgtggaggggtggtggggtggatggggtttatgggtgaatggatggatggatgggtgaatggagtaaatgagtgggtggatggatggatggatgttgtaagagtttttttggagggttttagggaggaattggtatttttgattagtagttagtatggtgattagatatagggaggtgtttgggtttgtttgattttttattttattgttggtgggattgggttggttatgtgtttttgaagttttttgaagggtggttgtatggtattgtttaggggatatttttagagtgtcgtgttttatagtaatagggtggtcgtttgtgtttttagggtcgttttttttggtagtttttcgggtttgtttggtttagtattttagtaaattttttcgagttaggatttgtttgttatgagtttttttaataagtagttttaggttaaggtttgtgtgtgggtagagggagcgtatgtcgcgggaggttgtattaatttgaggttttgtttttgtttttttttggggtaaaaggtaaaaatagtttgttttattttatttttaaatttagttcggttgtatttagttttgggagtgaagggggttgggttaggattgttcgtgagttgtagattttggtgtagggaaattttgatttataagacgggtggatatggaggaaggaggagatttcgtttagtagagatacgtttgggtgtagtttagtttggagtttgatggacgtgggtttatttgtgtgtaatttttatttattgtgtggttatagggaagtgatattttgtggagatttagattttttatttgtaaaataggggtagtagggtttgggggaggatgtgtgtgaaggtttggtttagggtttttttagtagttagatagtagtggttgttatttttttagcgtttagggttatttgggggagtagggtttttgtttttagatgggtttcgtttttggttttggaatttatagtaggagtaaaggcgaggatatttttggtgttaattatttattcggagggagagcgttagtggttttgtgtgatttttgttttttgtttttgtttttaggaggtacgcggatttttagtggtcggtttcggaggtttggtgattttagtggtttaggtaggtggttcgtttcgttttggttttatttagtttatgggtgtgtttgtgttggggtttttttattttggtttgggatttgtttttttatttggtttttttggatgagtggggttatttgtttattttttagggagacgtagtttttgacggttttggatttaggtggtttttaggtttgtcgacgttgttttgttggagatgatttttgtgggggtaggggtagttatttttaggtttagggagtaagttcgtgtgtgcgggatagaggagagaataggagatagatagggttggatgatttggtttgagatgttgaggggatagatgtgttatggataggtggttttggtcgtgagtttttcggtgttggtttagtatttgtgggttttttgtaattttgtaggatggaagatgttttaggatagagtagatacgttcggtgttatttaggaggaaataagtgggtttttggtagtggttattgtgttattttttgtgttttttttatgtgtttggaaattttttatattaattagtagggaagggaaatagatgtatttattagagttttggggttggtcgtttaggatacgagttatagtttataggtttgaagggattttattaatattgggtgtagtttgggtaagggagtgggatagagaggttagggttttgtttttagtttttgttttttagggttgagtttgcgcgttattttttttttattgggtgtttttgattttttttgtttgattttagtgtggttatgttagtgtttttgtttttgggagtttacgttgtttttggttgttatttttagcggttaggttgggataggtgtttatttagtggtttttttatttggagaggatgatgggttatagtaatgaatggatttattttttttaggagacgaggagttttgagaagagtagagatggcgtggttatttgtgtatatgtgttgggggttaattgggtgttagatttttggttgttattatggtggtagataggtagggattgtgtttttatgaattagttattttagaggagataaagttattaaaggatacggattcggagttaaatttatataaatagagcgtttgtggattagggttgtttttagaataaggtgagatagtcgttttgttaggataaggcgtttacgggggtaagggtatgtgtttatttggagtcgttatttttatgttttagattagtttcgtttaatagaattttttgtgatggtgggtttgttttatatatttgtatttcgttattttgtatggtagtcgtttagtcgtttgggtttattgtatatttaaagtataaatgtttacgtttattttatttatttatttatttgtatagaattatttatttattttaaatggatttttatttatatttacgtgtggttagtggttatgaaattgaatagttttagattatattggtatttgagattttagaattttagatttaaagtttgtttttgattttgagtttgtttttgtggggatagtatagacgttttttaagtttgttttttagaggtggatgtagtgttcgtggattgtgtattattaggtttggatagtggagagggtggttttttatagggagtgggagtggaggggatgtcgtgtttatattgagtgtatgtgaggttttttgtagtataggatgggattgtatgtgggaagaggggggtgatgttttggttggaggtttttgggtagttgtatgatttagcgttgtggttaagaggggtttcgtttatcgtagttatgttgggtattaattattggatagtttagtcgttgttgtgtttttggggagttttttttcggtttcgtatttgatttgtttttttattttttttttttttattggttagtttttggtggaatgggtggggagggttttttagtttttgtgggggttgtattttgggaatttggtattttgggttgtatggatatagtttttttcggcggttgtttttttttgtttagattggttggttttgtgttgttagtatttggtagttacgattatagtttagtttggaagtttaaggtataatttgttgaattttaaagttgtaagttggtgatttgggtttgcgtgggattgtttgttgatatacggggttttttttttgtgggtttttgtgggttttggttcgagatattttttttttatttttttggtttttttttttttttttgttttttttttgttaagattttggtttaggtaggagtttatttttagacgttttagtattttcggtttttttatttgatattttttagacgattgtttgttattttatttttttagtttagtttttttgtagatttatatttggttaattttttatgtttgggatttttgttttttttagaaggacgaaggtttttttcgaggttgtgtttgggattgggttagggatgatatttttggtaaaagtttaaatgatattatgattaacgttttggttagtttatatattttttttttttttaaaaaaaaaatggaatttttagagttataaaataaaaatgtaaagaataaggtaataaaatatttgtgtatttattatttcgtttaagaagtgagatattgtaggtgtagtcgtagttttgggtgattttttttattttagttttatttttgttgcggtgttcgtttttttggattgggatttggtttcgggtaggtatatttgtgttgggtagtggtgtgtttgagaagtttaggtttttttttttttttttttgagatagagtttcgttttatcgtttaggttggagtgtagtggtattatttcggtttattgtaatttttgttttttgggtttaagcgatttttttgttttagtttttttagtagttaggattataggtattcgttattatgtttggttaattttttttgtatttttagtagatatagggttttattatgttggttaggttggttttatatttttgattttaggtgatttatttgttttggttttttaaagtgttgggattataggtgtgagttatcgtattcggtttggtttttttttgtatacggttattagtatcgtgtgattgagtagtttaggtttgtttttttttgaatgtcgttattagtattatatttttggtgttttattggagttagtggttgttttgtttgtgtttataacgtgacggcgtggagatttattcgtgtagatttacgaagttttggtttatttattttggtagttagcgagtgtttttttgtgtggggaggtagagtttgttcgtttcgtggtttattggtgatatcgtcgaaggttttttttgttattagtgttgtcgggaacgtgtgtttttttaggtggatttggttgggttgtggagatgcgttttttagtttttttagatgttattattacgttttttcgagtggttttttggtaggtttttttatgttcgtttattttttgtgttttaggtagtcgtttttttgattgagcgtttagcggatttttgttttgttttttacggtgtacggagtattttattttagtggtgtttgagtttttttttttttggtttttagatttcggttgggatttttggagttaatttttttgtttgatatttcgtgtcgttaggttttgtttttttattttttaatatttttggggtgtgtggttttttttttagtgtttttattattttttttgttttaggttgaatcgtgttttttataaatttatgtttattaaaaattttagaatgtgatttgggagttggagatggggtttttgtagatgtaagtagttaaggattttgagatgaggttattttggattagggtgggttttaaatttaataattggtgtttttaaaagaagtagagaggttatagatatatcggggagagttacgtgaaggtaggagtagatgatggagtgacgtagttttaggttagggagcgtttgggaagaggtaaggaaggattttttttttattttattttagagtttttttagggagtgtggttttgttgatattttgattttggatttttggtttttagtatgggagagaattcgtttttatttttttaagttttatagttgtggtttattatggtagttataggatattgatgtattttttatttggtcgttgtggatggacgatttcgttcgtaggaagttttttttaagtattgtaggtgtttttgtttttataggggacgtttgtataagtaggtgtgaaaaaagggttttgtgggggtaaggtttgggttggtgttcgttgtttttttttattttatgttagtttttatgtttttttcggtaggagtgtttggttttatttggtgaattagagttaaatttttttgataattggttgttatttatttaattgttattatttttaggagatagaaaatgttagaagggtggggtttgtgtagtgttttttcgttatttttttagggtatcgtgttacgttgttttaatgtatagagtagttgtttaaagtgtgtcggacgaataggtgttttatgtttagttatgtagataaaagtgtgttacgtggagggagttggtcgtggaagagattattagtattttggttgttcgaggattttgtttttgggtttttgtaggtatttttagtttattatttttttttttatttatagttatttattttttttttatttttttgatattagttttgttatttatttaggtttgtaagtaggaaattttagagttgattttgatttttgtttttttagtatttttaggttttaataggttgttaagattttattaattcgttttttgtatattgatttttggataggttgtttcggttacggttatgttttggttgggtttttattatttttttttggattagtaggtgttattttttttatttttgttttgttgtggtttttttttttttacggttaatatttagaggacgattattatttttttttttgtgtgttggggatcgggtgataggatttttttattcgattatttttattagatttgggtcgggtttttttatttatagagtttttagttttcgtttttaaagtttcgagggtggattcgtgttgtcgtttagtttggttttgatatcgttttttagtttggagttttttgtttttgcgtttttggttttgagtgttcgggttttttttggatgggttgttatttgttttttggaaagtagggtttttatgtttttggattttttagttgatttagtgattttgggttattttgttatattttttttattagtttggttttggttatttttgtgttttttatagtttcggattagagttacggcgggatgtttttttggtgcgtggtaggtagttaggaaatattgttggattgattttgataggagatgtttgggagaattgtttaaaaaattagtttaaaatgtaaatattggtttttttttgcgttggttaaagagtagtattttttcgtttgtttttcgggtaagaaattgatggcgaatgtaatgtttttagggaggagaagaaggtgataaaaagggtttgtataacggggtatacgttaggtatttgtgattatttaagtttaaattataatataaatgcgaaattttttgttttggtagtttttttatattgtaagcgtttattgttatatgtggttgttatattgattacggtagatatagaatattgatattattgcggagagttttatgggggggcgttggtttagattatttttacgttggatttataaatttattgtttatttagtgaacggttattgggtatttattgagtaagtaggatgaaagatattcgttttcgggggagtttttcgttggttgtagagaagtttaaatttaggggatttggggtaaattttgtaagggtttttggtttttgtatttttagatttttttcgttttgtaggggtagtcgggggttttttttaggaatggagcgttagttttagtttttgttaggttatagtttagatggttggttgagtacgagtatgtgagagtggaattgggtttaatcgggttgttttttttcgttgttttggtttttttttacgttgatttggaaggatttttaaagtaataggtttgtttaggcggtttgtattagtaaattttgtagcggttttaagggtagagatagttggattgtatttatttaggaatagttaaagtttgaggtataataaaaagtggagaaagattttagagaggaatgtagttggttttagtttgggaattcgttttgtttgggaggttgtaggcgggttaggttggggttagtttggagggttttggttggttttgttggtaggtatagtagtagggttagtaggagggagtttaggacggagtttttttatttttaatttagggaagtaaattttagtggttgagtttgaggatgagtaggaaatgaatggaaaagtttttttttttttttttttttttttaggtagggtttttttttgttttttaggttggagtgtagtggtataattatagtttattgtagttttaatttgttaggtttaagggatttttttgttttagttttttaagtagttgggattatagttgtgcgttattatgattggttaatttttaaaagaaatgtttttaggttaggtatggtgatttatgtttgtaattttagtatttttggagtcgaggtgggaggattatttgagtttaggtgttttagattagtttgggtaatatgacgagatttcgttttgattaaaaatataaaaagttagttgggcgtggtggtatagttttgtagttttagttattcgggaagttgaggttgtagtgagttgtgattacgttattgttttttagtttgggtaaagggagtaaggttttgttttaaaaaaaaaaattttttttttttttgaggtggagttttgttttgttgtttaggttggagtgtagtggtatgattttggtttattgtaatttttgttttttaggtttaagtgatttttttgttttagttttttaagtagttgggattataggtatgagttattgtgtttggattttttttttttttttttttttttgtagagatgggatttttttatgttgtttaggttggttttgaatttttggttttaagtgatttttttattttggttttttaaagtgttggaattataggtgtgagttattatatttagtaggaaaagttattttttaaagcgagaggttgtgcgttttttatagtttggcgtttattagtatggaggatttattggaacgtgtgttaggtgaggggatatggaagatggtagtaaattcgagtttagagtattagaaagtatgtttttagttaaagatgcgttttttttattttcgcgtagtatttttttttagtgtgtatttttggagtaaggtggggtcgattttacgaagattttttttcgaaggtttttgttgtttatattagtgttatttggatcgtttgtttttttttttggatggttggattagttttagggttttttggtttggtgtggggagtatagtttattttggggaatgtttggtatgtgttttttttttattgggtattaggggatgaagttgtgtttcgtggaaggggatagaggcgttggtgtttaggatggtgtatttggggcggttgaattggatttggtttttattgggtttttgtggagtttagattgttgtgagaaggggtggggaaaggtaggtgattcgtattttttatttttgttttatatgggaataggggtttattttgtatatatatttagtttggagtatgaatttttatgaagaggaaaatttttattaggttttgatgttaggattgttcgtgagggtcgggtcgtgttttggggtaaggataggagtggagggggtaattagggaaggttttttaatggaggaggtatttgatagtattttgaaaaagaagtagtttttaggttaagttagagattgaagaatgattatttaattttttttttttttttttgagatggaatttcgcgttgtcgtttaggttggagtgtagtggcgtgatttaggtttattgtaatttttattttttaggtttaagtaatttttttgttttagttttttgaatagttgggattataggtatgcgttattatgtttagttaatttttgtatttttagtagagacggggttttattatgttggttaggttggtttggaatttttgattttgtgatttatttgtttcggttttttaaagtgttgggattataggtatgagttattgtattcggttacgattatttaatttttttttataagatgttttttggttgacgtaaagtaggttgagtgagtgtgatattttttttttgtttgtgggtttcggtttttttagagttcggttagtgttattggagataaagtggttttcgtttttttttttcgttttgttaggtttagtttgtgtcgttgagttttattttgtaattaagaggagttgtgaattagtgatgttgatgtcgtagaaaagtggttaggggtttatggggggtgaaggatagggatgtcgttttgagaattgtttggaaggggtttttgggtaatagtgtttattttagggtgtgggtaggttggggtggttgggagttgggtttataggttggtataattagagttttttaaagtcgtgggtttgagggttttgtttttttgggatagtaatttttggtttaatttgggaaaaggtgggttaaattaagttcggtttttttattgtaggattatttagtgcgtttagtatgtaaatgtgtttttgaatttaagataggattatagaaatttttttagtgtttttttggagggagggatcgcgggggatttatcgtaggggtttgggtttgtattggtttggtgaagtgtttttttagtgtttatattatgcgcggtgagaggttggttttcgttttttttattttttgttggttttattttattatttttgtattcgttttttagtcggtttatgattaatttttgtttttttagagttaatcggtgttgttaggttttttattttaagtgatttttcgtttgggttaaaatgtttggatttttaggtacggaggggagatggattttaggttaaattatgttgggtaaaattgagggttaaggttgtgtttagtaagtgttttagttttggtcgttaaatttatagtgtgtatagcgtgtaggaggtggttgggtgaatgaatttagttatagttcggttttttattcggggttgtttttaagtttttatcgttagttaggttgggttagagtttcgtggggtttttttgggtttttttgttttatagtaggagttcgtatggagagtttcgagtgaggttaatgggtttttttttttttttttttttttttttttaatttgagatagggttttattttttttatttagttagggtgtagtagtgtaattatagtttatagtagtttcgaatttttggttttaagtaattttttcgtcgtagttttttaaagtgttgagattataggtacgtgttattttgtttagttggggtttttgttttttatttttttttttgtttttaaatttaatataaagaaagatattatatttataattagaaaaattaataaggaatattattttaaaattggaaaagggattaaagaaataaattaagaaatttttgcgatttttgtttatcggagttagtggttgttagtggttggtttaatataatgttttaggaagaaatagaataatagaaagtaattttagtgagttgagttttggtttcgtttgtggcgttgtattagttttttgtagttgttgtaacgagtggttataagttggttgggttataataacgtttagttatttttttatagttttgtaggttatatattcgagattagggttattaggttgaaattagggtgtttattgggtatagttttttggaggttttagggtaggggtttttagtttcgtgtgttttattaggaattggtttgtatagtaggaggtgagtgattggtaagcgagcgaagttttatttgtatttatagttattttttattgttcgtattattgtttaagttttgttttttgtttgattagttatggtattggatttttataggagagtgaatcgtattgtgaacggtatatgtgagggatttaggttgcgtgttttttatgagaatttgatgtttgatgatttgttatcgttttttattattattagatgggatcgtttggttgtaggaaaataagtttagggttttaattgattttatattatggtgagttgtataattattttattatatattataataataatagaaataaagtgtataattaatataacgtgtttgtggtcgggtgtagtggtttatatttgtaattttagagtgaaattttgttttaaaaaataaaaaataaaggttaggtatagtggtttatgtttgtaattttagtattttgggaggttaaggttggcggattacgaggttaggagtttaagattagtttggttaatatggtgaaatttcgtttttattaaaaatataaaaattagtcggatacggtggtaggcgtttgtagttttagttttttgggaggttgaggtagaagaattgtttgaatttaggtggcggaggttgtagtgaattgagatagtgttattgtattttagtttgggtggtagagcgagattttgttttaataaaataaaataaaataaaataataaatataatatatttgaattattttaaaattatttttttattttttggtttgtggaaaaattgttttttttgaaatcgattttaggtgttaaaaaggttgggggttattgtttttatcgtttgtttttttgagtttttggtggttgtgggtgttttttggtttgtggttgtatggtttttatttttaatattagtatttatagattttttcgggttttatttttatttggttatttttgtttgtgttaaatttttttttgttttcgttttgtatgagtatcgagattgtttttagggattatttagattatttagggtgttttcgttatagtaagatttgtaattgaattatagatgtaaaaatttttgttttaaataaggttttatttgtaggtttagggattaggatatgttatttttggggttattatttagttttttttcgtgattatgatttttttttttttttttagttttttatttcggttgagatgttgtttttattttttttattgtttggttgtttgtggggttgttttttaggttttttgggaggaggtggttgtttgatgttttttagaaggttgggaatggttttttttattttttaggaagatgttttttttgttaaggagattgtatttggggttttattttaggtagagagcggacgggattgtggtttgaagtggtattttagggtttttggttttgttatttagtcgagggttgtgtatgggttttatttggttataggtaatttatttggttttgtggggtagggattgtaaatttagaggtttgcggggtgtgtcgaggtagaggggtgtaaatattgtaaatttgttgggggttttggggagtagtatagattgaaaagtgttttgtttgaagagtagaattgttttatattagttttgtgcggttaggtaggaaggttttcgtggtgcggttacgcgtttttttttttttaatagaagttgatagtttggagtttttagagagattgtttgagtttttagttttggtataaatatatattttttttaaataggtttgggttaatagaattagttttcgtgtttcgggtttgaatgaatttttgaggtgaagtttaaagatagagaggatgtttttgatttttattttagggatttatattgtaaatttttatttgttttgttgagtttttggttttagtatggattttgattatgtgttggtggggattttttaggtaagtaagtagtttttgaggatttcggatgaatagtggggaatagtattgattttttagtggggtttcgagttttcggagaggaagattcgtttttttttaggggacggttagagatttattgatttatgcgtgtgtggtaggaattttttaggaagttttcgtttcgttcgttttttttgtttgggcggggacggtaattgtttttgttattgtagattaatgggacggaggggggtgattttttagggttttttttgggtaggtgtttcggaatttttttttagtacgttggtttggggtacggtcgttttttttgtttagttacgttggggtatagggtgaagaagggttggggttagtttaggatagaggaaggcgaggtaggtacgtaggaattgggttttttaaatttttaagtttaaggaaatcgtagtatcgcgggatagggaaaatgaaagattttggaagtcgttaggaatttgattttgtgagttggtttttaagagtttaagttaagtatttttaagtggatattaaaaaggagtagtaagtttcggggcggcgggggttggaggaggtggagagaggaggttgtcggaagtcgtattcgggatttttgtagttatcgattagatcgggcggtcgggattttgggattttcgtaggtagattcggtggtttgtcggatttttcggggtttatttcgggtttttttttttgttttttatttttggattttttttttttgtttttttttttttttcgttttgaagagataatgttattttagtttggagtataaatatatgattagtatatggaaatgtggtaattcggatgtattcgtgattgtaatagattgaagaaattagattagataaagagtgtttttagaggaggaggaggaggaggaggaggttgagagagggagggcgacgggggtgagaaaggggaggtcgtttttgagcgggacgtcgggattttcgtcgttgttaaatatattcgtaggaatggagagggatcggattttaggtacgtagatagttttttttttatcggtcgttttttattgttttggattcggggttttatttatgtttgggggaataagtatgtaaagggcgtttttgtttattttttatagaaatattttttttttttttgacggttttaagttcgtgggatgaatttcgttttagaagttaagtttttttgagtttggtttttatttaaattcggttttttttttttttggttattttttttttattttttagtgtgttatttttgtatgttatggttattgttaatgttgaggttgttggcgtcgaaattttgggagggtgtgggggatttgtttttttggttcgggtttggggcggcggcgtttggatttggttggtggttggtttgtttattgtgtggtttgttttttgtttttagttaaagtttgtttttaaggttgtttcggttttttatttaaaatagtatttttgtgtttttttggtagttgattatagagggggaagttttcggcgtttagaggagtttggcgtgtgtgtgtacgtgtgtgtgtatgtgtgtgcgtgtgtttatttacgttggtagtttttttgtcgtaggtatagatttattagggcgtgaataggtaaatgaagagaaagggggtttttttgtttttagtttattttagttttttaggtttttttttttaggtttagtttttttggtttttttatttatatgcggtgtcgtggttgttattttacgtggttagcgtcgttatcggtaattagtagtgatgatagtttttgtcgtttatgtcgttttttgagtttagcgttgggagatatggggtggttgagttaagttttaggttttgggtattttgaagtgatttacgggttatggagcgggaggtcgttaagagtgttaatttttacgtgttttgggttttggtttgttggttgttattatgtgtgtgttggggggtttttgagaggtttgagagagggaggtttatttcggtggtttttttttaggacgtgtggttttttttattattgtttttagggttatatttttttttttttttttttttgagacggagtttggttttgttgtttaggttggagtgtagtggcgcgattttagtttattgtaagtttcgtttttttagtttatgttatttttttgttttagttttttaagtagttgggattataggcgttcgttatatttttttgtatttttagtagagatggggttttatcgtgttaattaggatggtttcgattttttgatttcgtgattcgttcgttttagttttttaaagtgttgggattataggcgtgagttacggcgttcggttttagggttatattttgattgttacgttgggattggtggagcgggtgtgtgttgtgtcgttgagtatatttagtcgggtatagtaggcggattttaggagggggttaggggagacggtagaaggtttgggtggtagtgaaattgtattttatttgtttgagttcgggggtttaggttcgttgggacgggtgggtgtggagtttagcgttttgtttttcgtttagtaggagtcgtagggtagggagcgttgagagggattttcgttaggtttgtatagtggagtcgttttcggagtgattattttattaggtagtttgggtagattatagtgggttttttgttttttgggttattagttttaggaggacgttattttattcgtttggttggtaggggtttcggggagtttcgggttcggtttttattttatagatgatttagtcgaggtttagatgggtgattagtaggggatttgagagttgagtagagaggcgtgggtttgggggtggtgttttttggggagttggaagtgatggtatttttttaggtttataaaatacgggttttttatgaattgaataaaatattttttgaaagtagttagtgttgtgttttagagattattttgatttttgttgtttttggttgaggatagtatagttagggatgaagcggggattttttttcgggttgtgttttgatgaaagatgttttttataaaattttattcggatgtgtttttatgtaagaaaacgtatatttttagaaatttagttgtaaattggttgtttttcgaatgaatacgatagtttcggagttgttttttttaatgaggttttcgttttgggtaaattttagcgttggtttttaattgttattgaattttcgtatagtttttggggaagtgattttttttttgtttttgttgggtggttttgagtaagttatttggtagttttgggtcgtagtttcgttatttgtaaggtgaggggtgggagcggtacggtttttaggtagcgtttttattttttgcgggtttttgcgcgtgttttgagttttgtgggcgtttttttttttattgaggggttttttttttttgtagggtatggtttacgtcgcgttgttaggttgtaagttattgcgagagttgttttgatttttaagtatgttttggtttgaggaggagttatggggaggacgttgtgtttgtgtgatagaggtttgttcggtagatgtcggttcgttgatttttagacgtggttgtgggtgttttatgttttattgggttggcgtgtgaggcgtgtttagtttaggttgttttatagttgtttaggaagggtttgtgggagggggtggttttattttggtgagtttacggtggtttgttagttttagggaaggtttaggagttttaagatttgtttttttgtttttttttcggtagtgtttggtttcggtttggtttgtgaacgggggtttgggtattttttcgttttttttgggggttgtggtttttttttgggaaggtgttggagggtttgttagtagggtcggtatgagttatggagtggtgattggtcgttgaggtatggaaggttattttttttagttaagggtcggagttttttttttgttttggaacggttttgtggtttttataaattaagtagttttattttgttttaagagtttgtattttagtagggagagagtttttaagaagggaattttttattggggagttttgttgggttgggaggttaggaataggttacgagggagggttgtaggtaggggaagtggtcgtttgtgtatggttatgaatgtaggttcggggttttggagggggtttggttacgttgtcgttggacgtttgtttttattagggtttatttgatgtagtacggtatagggtaaagtttagttttttttacggggtttttgggttattagtgggcggggaatcgaggttttttggagggcggtgttttagtttttattttttttttttgtttttcgttgtgttgttttcgatggtttttgttattttttgggagtttttatttttggacgttcggtgtttgttcggttttaatttttttagttttgtttttttattttcgaggtgagaggtttggtttgacgcgttttgtattcgttttttgtttagtttcgtgggaattttggtttttgtagtggttttttggggttgttattattaagtgttataaattgggtggtttaaaatattagatattttttttttcgtcgttttggaggttagaagttcgaaattacggtattagtaggtttggtttttttcggaggtttcgagggggagtttgtttttcgtttttggtagtttttggcggttttcgaaatttttggcgttttttggttcgtggttatattattcgatttttgttttcgttgttacggggtttttttttgtgttttaaatttttttttgtttgttttttatacggatagtttttttcggatttagggtttattgggtaatttaaaatggttttattttaagatttttaattttataacgtttgtaaagattttttttttaaataggttatgtttataggttttggggtggatgtaaattttaggggttattttttatttttttgttgttttcgtgtgtttggatgtatagtatggttttatgttttagattttttgttggatttttttggttttttggggtggtttttggttttttttattcgtttttgtgtttttggtgaggtgtcggggtcgggtttagtttttgtaggaattttggggatagtatggagtcggtaattttttattaggcgtttttttatttgtttagagtttatggttgtgaggggtttttttttgtggttttgatttgtaattttttagtggttagtgatgttgagtattttttcgtgtttattgtttatttgtatatatttttgtagaaatgtttgtttaagttttttatttgtgtttgatttggatgattgttgttgttgagtgttaggagatttgtagattaatatttagatattaattttatatttgatttatgatttgttgttattttatggattgttttttttttacgttgttagtgttttttgatatgtaatttttttttttttttttgagatggagtttgattttgttgtttaggttggagtgtagtggtatgattttggtttattgtaattttcgtttttttggttttagcgatttttttgttttagttttttgagtagttgggattataggtattcgttattatatttagttaatttttgtatttttagtagagacggggttttattgtgttgattaagttggtttcgaatttttgattttaagtaatttattcgtttcggttttttaaagtgtcggagttataggcgtgagttatcgtatttaggttgatatgtaaatattttaaatttttatgacgttttattttatttatttgtttttttgttgtttgtgtttttggcgttatatttaagaaattattgttaaatgtaacgttaggaagttttttttttgtgtttttttttaagagttttgtggttttagtttttgagtttaggtttttgatgtaagttgagttgatttttgtatgtggtgtaagggttggtttagttttatgttttgggtttttgatttattttttttttttttttacgtttagttggtttcgttgggtggcggggaggagtggggaagtttcgggttgggtttgtattcgattatttttttttaggttagttagggagttttagtttttgtttaggatttggttggacgtgttttttatcgggaaagtttgggtcgtttttttaggttgatggtagggttagttcggggcgttttgaggtttgttttgcggatatgttttttgttttaggtggtgtggttgttcggtttgcgtgtgagattagttgtttgtgttttaggttatggaggttgagtgtttttagtttgtttttttgttcggttttttttttggggaagtttttgtagtttattttttgttttcgtttttgttatttgtgtttttgtttgttttttgtttggaggtggttatttttggggttattttttatgatttggatataagtttttattttgaagttattatttaaatttttgtgttttaaattttttttatttattatatgggtttttattgtgattaatttagtagttgatgaagttttttttggggtttttttagtaacggggagttggttttttcggaggtttggtttttttttaagtggaagtggggcgtgagggtgttagtttttttttgttgtttggtgttttaggttggtttgttatttttggaagtatttgttatttttatatagtattttatatttattttttcgttttttatttttttttttaaggggttatttttgtttttttttttatttaattttatttatgtggttcgtttagtaatttttgatttttaatatgataaaataaattttttttgtcggttatttatttatttatttagtattgggtgttttttgtggatttggcgttggggtttcgtggaggataaagttagatatagtttttgtttttatgggattgtataagtgtaagattatattagtaaacgtgaaatataggaagtgataggtgtgataaaggggattagtggtaggatagaatttgcggttcgtaggattaggttaggagggttgtttcggggggatattttcgggttgagcgtagaaggatgaggggagtaaattaggtttaaatttagtaggtagaggcgatcgttgtaggtaatcggtaatgtgtttaaaggttttggggcgcggggggttgaggtcggtagtacggtaggaagtaagattggggttgaaagagattgattgttatgttgtgaaatatatatttggtttttatttttattttttggtatataatttttaaaatttttggaatttttaaagtgatgtttttttggatgtttatgattgatagattagttggtagttttaggatggtttttagggaagattaggtagaattataaggtttagtattatttcgtaatttttaggtaggggagaggggttgaaggttaagtagattattagcggttaatgattgaattaattatgttttcgtaatgaggttttcgtgaatatttagaaggatggggtttcgggagtttttggatggatgagtatgtggaggtttttggagggtggagcgtttggggagtatatggaagttttgcgttttttttttatattttgttttatatatttttttttttgtattttttgtaatattttttataataaattagtaaattttatgagttttaggaatatgtgtaaaagaaaaaaaaaagaataaattatagttgttgtagtaagttaattttattagtattggtttttatttgtcgattttatttttggtaatgttttttttttttgggtttttgggattttttcggttttattattttttttgtagtggtttcgttggttgttgtttttaggttagtttatttttattcggtttgtttttattaggggttgaggtttttttgtttattttagttttttggttcgttttttgttttgggtatttttttatttcgaacggttagagtttttgaagtcgttcgttgtgtgttttcgtttggttttatgtatttcgtacggtgttttttagggttttttattggtaagggtattggtatagattttggggttgttttggtttaagtttattttgatttggagtttgagggtttttgagggggttttgaaggttagggtaggtaaggttggtatgttttgggtagtgggggttgggtatgggaggggatcgtgggtggggagattttttttaattagcggtttacgtttggagattgatttgggttttaggttacgttttgaaattgggatagagagtggcgtagattttagttcggagattttttttgtttgtggacgtttttatatttttattcgtggagttatttttttttttttttttttaaatggggaaattttgatttgaatattgaataaataatatattttcgaaattagcgaagaggtattggttttgaaattttgttatgaaagtttgaaaatgttttttggatcgatttgttggaatagacgggtgtgatggggttgcggggttttaggtggtaggaggcgttttcgtgtttagggtatttcgatgtttagagttttttcgtgtttagtgtgtttttgtatttagggtatttttatgtttagggtgttttcgtgtttagtgtgtttttgtatttagggtatttttatgtttagggttttttcgtgtttagggtgtttttgtatttagagtatttttatgtttagggtgttttcgtatttagggtgttttcgtttttagggcgttttgtgtttagggtgttttcgtgtttagtgtgtttttgtatttagggcgtttttatgtttagggtgtttttatgtttaggtattgtttttttttatttttttaatttttttttattaataggtgttagttgtgaaatgtttgttgtgtgtgttttttggttgagtttattttgtgtttttaagtttttgttagatataggtaggttgttttagtttttttggtaaatgttttgttgttgttgtttgatacggggttttatttcgttatttaggttggagtgtagtggcgttatttcgttttattgtaattttcgttttttaggtttaagcgatttttttgttttagttttttaaatagttgggatgataggcgttcgttattatgtttggttaatttttgtatttttagtagagatggggttttattatgttggttaggttggtttcgattttttgattttaagtgatttatttagtttggttttttaaagtgttgggattataggtatgagttatcgtgtttggttcgtttggtgaatgtttattgaggtttattatgtgtagttttttttttaggtgtttggtttgtaatgaggagtaataaagatatagtcgttggtcgtttgttatttaatagttggaattgagaggtagtttataaatgagtaaatttataggtggttttagatgaggattgtgaagaagttaagaataggttgttgggggtgtatatttgtgtgtgtggcgaggggattaatggaagttttttttgagtggtgatattgagttgaagttgtaatgattagaaggatttagttaggttaaaatttaagggaagagtaatttggtaaaggaaatagtaggtgtgaaggttcgaggttggagtttggggaaggtgggagtggttggagtgtgtttttagagacgggttatggtgatattaatgcgataggtagggttaggtcgtgtcgggttttggaggttttggtgagggtttgattttatttttattatggtgggattttagtgttttgtggttgttgagaatggttaggggtaggtagggaggtttgttagggaggaggttgttgtaggttttgtagttggagagggaggattaggatttttttagagaggaagttggagagggaggatttttttgattgttggatggatttatttgtttggttgttttcgttagtatttagtagaggttattggatgttgataggtggtcggttttgtttagttttgtattgttttgtgttgttttggtggttgtcggttttaggaggagcgtttttggtgtttgagtttagtggttttggttgtggtttggtatatttggtcgtgggtgaggttaaggtggtttggattttgggaaggttgggtatttggtagttttaaggtaggagttggggtgttggaggaggaagtacgtttatttttcgtttttttttgtttcgtgggatgttgagtttttgggtagggatatggtgagttttggtgtgatgtatttaatatttgttggtgtttttatttttaagtaggaattttggtgtttggtgtttgaggattgttgtttatcgttttattattttttaggtttttttttagtttttgattcggggtaaggtttagatatttagaatatttttggttggtttttggagttggggtgaggtagaattttttttttatatttatagtattagttaaggtttcggggtttggatattatttttgggaggggtgagtaggataagtgaggtttttagatttggggtggtttcggattggttaggtaggtgggtgggggttgtagtttatgttttcgttttaggtaatatagtcgagttgtagttttcgttttatttttagttggggttttttgtgtttattttttgttttttttttttttttcggaatggggggtggatattttaagattagttttttagttattttttttgttttttgttttttttttttcgggatagatttttgtgatcgttgggtgtttttgatgttttgttttttttgcgttttgtgtcgtgggtgagagagggtttcggggggattttttttttttggagtatttgttgtttcgggtgtttttgggggcgggtttttattttatattgtggagttggtgtaggaaggaaggtgtcgggagttagttttaatttacgtgttggttgtggtttttaaggtgtggatggtaggaggtggtgagatagggatttattgattatgggattgatatttttttatgttgatgtgggttttgagttataattttattagtttttgagttttggcgttgtttttggcgatggcgtggatttagttaggttttcgggtagttttttttggatttttttttcgtttttttttgggtagtgtttttgtttatttggaaaggatgggtaggatttggagataatagggatttaaagaagtcgggagtgggggtatttgtgtagtttattttgtagaatagataatttggttaaagtttaaagtttgttgttaggagtttcgtttgttttttagagagtatatggtttgattattacggggattgggggagaggtataggtatgtttgttcggtagtagaagggaatttcgggtttgggtttttttattttgtggcgttgtttttttttagagttgtattgttttttttattgtttttgtttggttttagtgtttatgtggtttgtggtttttagtttgggtttggtttttcgtaatttattttgtttagttttatatagtttgtttttttagttgggaatcggagtttatttggagttttaggtagtagattcgatgtagtgatgtagggttgttagttatgttagtaggttttgttgtttatagagggatgggtattgttgttgataataattaaagaattacggttttaggttgggtatagtggtttatatttgtaattttagaattttgggaggtcgaggtaggagaattaattgaatttaggagttttagattaggttgggtaatatagtaaggttttgtttttataaaaaataaaaaataataataataataaaaattatagttttagaatgattgattttagtatgtttataaagttaagggtttttagtgttttgggtttatgttattgcgttagagggagagaggaagaggttggggtgatgggtattggggtttatgttttttttggaatgggtggttttggattgtgtttgtgtgatatgtttgtcgagcgggggcggtgtttattgaggattggatgttgaggtgtgggtggggggaggttatgaagtattgggtatttttcgtgtattagtgtttcgagattgtagagaggggattcgtttagtttgggtagggaggcgggtggtagcgaggaaggggagaggaattcgggtgtagaaagttttttttttagtaggtggcgtcgtaagttttcgagagtttagtttttgcggggtttgtatttttattgaatttgtgggtagaggttgtttgggtgtagttttcgttaattgtgattgtttattgcgggcgaggggaagtggagtgtagagaatgtatcggagggtagatgattagttttcgtataggtacgggggtgttttttttttcgtataggtacggggggttcgagtttttggggtttttgttttaattgggcggggaaagggagggttggaagttgagttagggggaaagggggtggttttttgttattttttttattttattttttttatttttggttgataggttttaattttttttatatttttttaattttttgtcgtaaaattttttaaatatagaaaagatgaaagagggttgagtgtggtggtttatgattgtaattttagtattttgggaggttgaggtaggaggattatttgagtttaggagtttaagattagttcgggtaatatagtgagattttatttttataaaggatataaaaaattagttaggtatggtggtgtaggtttggagttttagttattcggaaggttgaggtgagaggattgtttgaatttgggaggttgaggttgtagtgagttgggattgtgttaatgtattttagtttgggcgatagaataaaattttgttttaaaaataaaataaaataaaattataaaaaagaaattatgaaagattttaaagtaaatatttatgtatttattatttagattttatagtaattattttgttgtttgttttattataaatttttttggttattagtatttacgttggttttgatgtatttaaaataagttgtagaaattagtatataatattttgttaatattttagtttgtattttattaattagagttcggtatttgtttgtgattatttttgtttttttttgaagtaaaatgtatatattttgagatgtataggtgtgaaacgtttcgttttttgaattttaataaaggtatttacgtgtattttagtttgattagaatatagaatattattattattttagtaagttttttatgtttttttaggtgtattatagtttttattttttttagggtaattataattgtgttttttttttattacgaaataattttgttagtttgagtgttttttagagttatttatgttgttgtaggtgttagcgatttgttttgttttattgttgagtaacgtttattgtgtgaatattttgtgggtttttagttatttttttgttgaaagatttttggttgtttttatttggaggtttttatgagtaaatttgttacgttggttttttttgtataagtttttttgtgtatatgggcgtttatttattttgtagaaatatttagagtaggtatagggtaggtatatatttagttttataagaaattgttagatttttttttaaagtggtttttttattttatatttttattagtaatggatacgagttttagttgttttatattttggttaatatttggtgttgttattttgtgaaattttagttattttggtgggcgtgtagtggtattattttattatggttttaatttgttttggtttgatgattaatgcggttgagtatatttttatgattggttttttatatattttttttttgtgaaatgtttttttaaatttgttgtttattttaaaattgggttgtttgatttttttttttggatattgattttttgttagatacgtgttttataaatattttattttagtttgtggtttgtttgtttattttttttttttttttaagaataaggtttcgttgtattgtttaagtaggtttgaaatttttgggtttaagttgtttttttgtttttgtttttttaagagtcggttttataggtatgagttattatgttcggtttgtttatttttttagtggtattttttaataagtaaaagtgtgttattttaatttttatgaagtttaatttaataaatttttttttttgtggttttttttttgtgttttttgtaagaaatttttgtttattttgttaaattgtaaagatatttatgtttttttttagaaggtttagagttatatagtttttatgaattaatttttgtatatggtgtgaggtagagggttagggtttattttgttgtcgttttatgtgtttatttagttgttttaaattttatttttttttaaagtttttattttgtatttttttggtgatttatgaggtcgtataattttttaagatttttgttggttatttacgtatttttttttgtaaaattatttgtttacgttttatttttttttaaaattatgttgttttaagatcgagtgatttttgaagtttttattttataatgtttgaaagaatgaatattttgttttttagttataggtttttgttttttgttttgtagttgtatagtggggtaagatttgggttttgttttgttgttgttttgttgtttttttatttgattgtttttttatgggttttatttaaaaaaaaaattggtcgggtatagtggtttacgtttgtaattttagtattttgggaggtcgaggcgggtagattacgaggttaggagattaagattattttggttaatacggtgaaattttatttttattaaaaatataaaaaattagtcgggcgtggtggcgggcgtttgtagttttagataatcgggaggtcgaggtaggaaaatggtgtgaatttgggaggcggagtttgtagtgagtcgagattgtattattgtattttagtttaggtgatagagtaagattttgttttaaaaaaaaaaaaaaaaaaaaatgttgttttatatgttttttatatattttggatataagttttttattagatatatgtattataagtttttttttttatattgtttttttttttttggtttttttaatgatgttatttaatgagtaagagtattttgtttttataaagtttaatttattaattttttttagtttcgatttatgatttttgtgatttatggaggaaatttttgtttatattaaggttaaaagaagtttttttattttttagaaattttatagttgtatattttatgattttttttattttttaattttttaaatttttatattttttaatttattatagtcgttaggatgttgtatgatttattttaaattagtttttgtatttggtttgaggttagggttaatttttgtttttttatatttatatttagttttagtatcgtttgttgaaaagatatattttattttattgaattatttgatatttttgttaaaaattattgattgtatatgtggttttatattagtatatgtacgtatatatatgtaggttttgtgttgattgtatgtgtggttttatattagtatatgtacgtatatatatattggttttatgttgattgtatatgtggttttgtattagtatatatatattagttttatattgattgtatatgtggttttgtattagtatatgtatatatatatatgtaggttttatgttgattgtatatgtggttttatattagtatatgtatatttatatatgtaggttttgtgttgattgtatatgtggttttgtattagtatatgtatatatatatatataggtttcgtgttgattgtatatgtggttttgtattagtatatgtatatatatatatgtaggttttatgttgattgtatatgtggttttgtattagtatatgtatatatatatatataggtttcgtgttgattgtatatgtggttttgtattagtatatgtatatatatatatgtaggttttatgttgattgtatatgtggttttgtattagtatatgtatatatatatatgtaggttttatgttgattgtatatgtagttttatattagtatatgtatatatatatatgtaggttttatgttgattgtatatgtagttttatattagtatatgtatatatatatatgtaggttttatgttgattgtatatgtggttttgtattagtatatgtatatatatatatgtaggttttatgttgattgtatatgtggttttgtattagtatatgtatatatatatatgtaggttttatgttgattgtatatgtggttttgtattagtatatgtatatatatatatgtaggttttatgttgattgtatatgtggttttgtattagtatatgtatatatatatatgtaggttttatgttgattgtatatatatatgtggttttgtattagtatatgtatatatatatatgtaggtttcgtgttgattgtatatgtggttttgtattagtatatgtatatatatatatgtaggttttatgttgattgtatatgtggttttatattagtatatgtattgtatatatgtaggttttatgttgattgtatatgtggttttatattagtatatgtattgtatatatgtaggttttgtgttgagatattattgtgtttttttgatattttgtttatttttttgttgatgttatattttgattaatgtggttttatagtaagttttaatataaagttttttaaatatttaaaatattattttgaatattttaggttttttgagtttttttataaatttaagaagtagtttgttgatgtttataaaaatgtagtgtgaattttggttgagattgtgttgaatttgtagattaattaaggaagaattggtattttaataatattgagttttttgtatagatggtatattttcgttttaaaggtttttttgtattttttttatttttttattgaaaaaaaatttttatagaattatattgttttgtagtttttaagaaaaagattttgtatgttatttgttaaatttatttttaagaattttatttttggtattattttaagttgaaatagattttaaattttatttttaattatttgttgttagtatgtaaaaatataatagatttttgtatgtaaattttatattttatgattttttttaaagttatttattattttggtaatggttttgtaggttttttaggatttaaatatatagttttatttttttttgattttgatgttttgttttttttttttgttttattgtattggttagagttgttagtttagtattgaatagtagtgattagtggatatttttgtttgtgttaaatttataatgttaattttagatttgttatatatgatttttgttagattgaggaaatttttttttatttttaatttgttgaaattttttaatatgaatgggtatgattttagtaaatgttttttttgtatttatggaaatgattattgttttgttttttattcgtttaataggataaattataatgattgatttttgtttttcgttttttttttttttttttttaaagaaatagagttttatttttgtttaggttgtagtatagtggtgttatcgtagtttattgtagtttgaatttttggatttaagtaatttttttattttagttttttaagtagtagggattataggtatatgttattatgttaagttaatttttaatttttaaaattttttgtatagatggggttttattgtgttgtttaggttggtttgtaatttttgagtttaagtaatatttttatttttgttttttaaagtgttgagattataggtgtgagttattgtgtaggtttgattttttaatattgaattaattttgtatttttggaagaagtttaatttgtttatgagatattattttttttatatattgttaaatttgatttgtttagtttttaaggatttttgcgtgttgatttatgagggatattggtgtggtattttttttgtttgttagtttgtttcggtaatgtttttgttagttttattttggttttataaaattagtttggaagtgtttttttttttttgttttttgtgtttttataaggttgatgttgttttttttttaaatgtttgatagaatttattaagaaaatcgtttggatttagaattttttattaggaaaggtgattgtttgtttttaattataaatttaatttaatgtatagaaagagttatttaggtttttttatttttttttgttttatttttggtaagttgtattttgaaggaatttgttttttttaggtaagttgttgaatttatttatttaaagttgttcgtaatataagtatatttagggtttgtttttagatttcggtaataaagtaaatattgtaataaagtacgttatataaattttttggttttttagtatatataaaagttatgtttaggttaggtatggtggtttatgtttgtaattttagttttttgggaggttaaggtgggcggattatttgaggttaggagtttgagaatagtttggttaatatggtgaaattttatttttattagaaatataaaaattagttgggtgtggtggtatatgtttgtagttttagttgtttgggaggttgaggtgggagaattgttcgaatttgggaggtggaggttgcggtgagttgagattatattattgtattttagattgggtgatagggcgagattttattttaaaaaaaaaagaaaaaagttatgtttatattatattatagtttattaaagtgtataagattattatgtttttttgttaaaaaatgttaataattatttgagtttttagtaagttataattttttttttggtagaaggtttgttttaatgttgatggttgttgattaggtggtggttgttgaaagttgaaggtagttgtggtagtagtttttttgttttttttttttttttttttttttttgagatagagttttgttttattgtttaggttggagtgtagtggtacgattttagtttattgtaatttttgtttttcgggtttaagtaatttttttgttttagtttttcgagtagttgggattataggtgtttgttattacgtttggttaatttttgtatttttagtagagatagggttttattttgttggttaggttggttttaaatttttgattttaggtgatttatttgttttggttttttaaagtgttgggattataggcgtgagttattgtatttggtcggtagttttttaattgaagtttttgatatgggttgatttttttttttatgaaagatttttttgtggtacgtattatgtttgatagtattttatttataatagagttttttttaaaattagagttaatttttttaattttggttacggattgattaaataagttgatgtaatattttaaattttttgttgttattttaataatgtttatagtattttcgtttggagtagattttatttttaggaattattttgtttgtttatttataagaagtaattttttatttgtttaagtttgattatgggattgtagtaatttagttttatttttaggttttatttttaattttagttttttgttatttttattatatttgtagtgattttttttgttgaagttttaaatcgtttatttatgagggttggaattaattttttttaaatttttgttaatgttgatattttaatttttttttgtgaattataagtgtttttaatggtatttagaatggggaattttttttagaaggtttttaatttattttgtttagatttattagaggaattattaattatggtagatattgttttataaaatatattttttaaataataagatttgaaaattaaatttattttttttttatgggttgtagaatgggtgttatattagtaggtatgaaaataatatttatttttatatatattttcgttagagtttttgggttataaggtgtattgttaatgagtaataatattttgaaaggattttttttttttgagtagtaggttttaatgatttttttttttttttgatggagtttcgttgtgttatttagaatggaatgcggtggtatgatttcggtttattgtaatttttgtttttcgggtttaagtgatttttgtgttttagttttttgagtagttgggattataggtatatattattatgtttggttagtttttgtattttttgtagaaatagggttttattatgttggttaggttggtttcgaatttttgattttaggtgatttatttgttttagttttttaaagtattgggattataggtatgagttattgtatcgggttttatttgttttttttttgttgttgttttttaattgagatagagtttcgttttgttgtttagattggagtgtagtagcgttattttagtttatcgtagttttcgttttttaggtttaagtgatttttttgttttagttttttgagtagttgggattgtaggtgtgtattattatgtttggttaatttttgtatttttaatagagatgaggttttattattatgttggttaggttggttttgaatttttgaatttaggtgatttgtttgttttggttttttaaaatgttgggattatagttgtgagttatcgtgtttggtttttttttgtttttttgtttttttttaaattgagatagagtttttttttgttgtttaggttggagtatagtggtacgatttcggtttattgtaattttcgttttttgggtttaagcggtttttttgttttagttttttaagtagttggaattataggcgtgtgatattatgtttgaataatttttgtatttttagtagagatgcggttttattatgttggttaggttggtttcgaatttttgattttaagtgattttttcgttttagtttttaaaagtgttgggattataggcgtgagttgtcgtattaggttttaatgggtttttaatatttagtaaattatgttgtaaatagatgtgttgttaagtagggtttgttattttatttttgaagtatagatagaatagatttggtagaatttttaagggttttaggatttttggaacggttaatgagtattggttttaatttacggttaatagttgcgttagttttttatgagagttagtttgttttttgaagttttaaagataggtattgattttttttttttagttatgaaaattttagatgatatttttttttagtagaaggtgggatatttatgttgaaattttgttgtttagtgtagttatttttattagtgttttgagttagattttttgggtaatttgttgtcgtttttttattagtatttgttgttttattttgtatttttatattatagagatggtttttttttttaaattttatgatttgatttttgttagttttaaattttttttttttagtttttttattttttttagtttttatattattgaagagagttagggttttgttttggattaggtttttgtttaagggaatgttgtggttgatttgattttttatttagattatttaaattttttttatattagtattaaggttgttttgttttttttttttttatgtgtgtattggaatcgtatttttaattttttttaataatttttttttggtatttataatttggttagttatttggtataagagattttatttttgtttgttttggttttcgatacgttttttttatttagtttaattatttttagtttttgatttaaagtgagagacgggtgatttttttttttatttgaatatttagaggttattgtagggttattaattggtttaattttaatattgttgagttttagggaatagggatgtttgagtagagggagagagagcggggaatagttagttagtggagtagttagaatatataacgtttattgaataagtttattgttttatttggatgtggttcgttatgttttaaaaataattgtaataatggtattgaagattattgattattgggcgcggtggtttatgtttgtaattttagtattttgggaggtcgaggtaggtggattatttgaggttaggagtttgagattagtttggttaatatggtgaaatttcgtttttattaaaaatattaaaattagttaggcgtggtggcgggtgtttgtagttttagttattggggaagttggggtagaagagtcgtttgaatttgggaggtggaggttgtagtgagtcgagattatattattgtattttattgtattttagtttgggtaatagagcgagattttattttaaaaaaaaaaaaaaagggtcgggcgtagtggtttacgtttgtaattttagtattttgggaggtcgaggcgggtagattatgaggttaggggattgagattattttggttaatacgatgaaatttcgtttttattaaagatacgaaaaaaatagtcgggcgtggtggtgggtgtttgtagttttagttattcgggaggttgaggtaggagaatggcgtgaattcgggaggcggagtttgtagtgagtcgagatcgcgtcgttgtattttagatagagtaagattttgttttaaaaaaaaaaaaataaagaaagaaaaaagaaaaaagagattatagattattatagtagatataataataatgaaaaagtttgaattattttaagaattattaaatttttatatagagatatagtgttaatatgttgttggaaaaatggtgttagtagatttatttgatgtagggttgttacgaatttttaatttgtaaaaagtgtagtatttgtgaagtataatgaaatgaggtgtgtttgtgttttttgttattgtaatgtcggtaggattcgtaaggaaaatattttattttttttattgtgattttatgttcgttattttttttttattagtagtttggttaggaggttattaatttagatttttttaaagaattagtattggattttttttttttggtgtttatttttttgagtttttttgttatttttattatttttttttttgtatttgttttagcgtattagttagggtttagttaggaaataaaaattatatcggtaatttgaatagtaatttgtaatataaagtgtttttaattgtaagaggtagttaattattaaagggattataaaggggtgatattgtgatataagaaagatgtatttgggttgggttcggtgtagtggtttatgtttgtaattttagtattttgggaggttgaggtaggcggattttttgagtttaggagtttgagattagtttgggtaatatggtgaaattttatgtttattaaaaatataaaaaattattttggcgtggcggtgtgtgtttgcggttttagttatttgggaggttgaggtgagaggatagtttgagttcgggaaggtagacgttgtggtgagtcgagattgtattattgtattttagtttggatgatagagggagattttgttttaaaaattaatgtatttgtttgtttgtttgtttatttatttatttatttatttatttatttatttatttagtttttgttttttaattttgtttggtatgtagtttttaaaatttttgaaatttttaaagtgatgggtgtttttttgtttgttaaggaggcgattggtggttggaggtttttggatagtttggggataagggttggttgttaggggatttagttttgtgattagaaggttagaatttgtagttttttttatttattttttgcgaggtaagaggggatgaaggttgagttgattattaatggttaaagattttatgttatgtttatgtagtgaagtttttttgaaaatttaaaaggatgaggtttgtagagttttaggttgttgaatatttgtaggtgttgggagggtagtgtattttttcgtggaagttttatgtcgttttttttatattttttttatgtattttttttagttggttgtttatttgtattttttgaaatattatttgtaataagttagtaattttaagtaaattgattttttgggttttgtgagttatttaagtaaattattgaatttgagaagggagttgtgaagattttaaatttgtagttaagttagatagaagttatgggtaatttggtgttttattatttgcgattgatttttgaagttgagggtagttttgtgagatggaatttttaatttatgggatttgtattaattttggttggtgttagaattgaattgaattgtaggatatttagttggggattgttgagtattggagaattgtttgggggtcggcgggaggaaattatatatttggtgttagagttgaagtattgagtgttgtgaatgagagtggagagatagagtttgttttgttttatgtaagaggattttaaggagtatagaaagagtaaatatgagaagtagttattttagaagaaaatataggaggaaagtttcgtgatattggagttggtaatgtttttttggatgtgatatcgaaaatataataaaagaaataaatgataaattggattttattaaaatttaaaatttttgtgtattaaggaatattattaatggcgtgaaaaggaaatttatagaatggaagaaagtatttgaaaatcgtatattcgataaaggattagtatttagaatatataaagaatttttataattaagttataaaataaaaaaaaataatttagtgaatagatatttttttatagaagatatattaatggttaagaagtataggaagagatgcgtagtgttattaattattagggaaatgaaaattaaagttataataaaatatgattttatattttttaaggtggttgttagttaaaatatggataatagtaagtgttggtaaggatatggagaaattggagtttcgtgtattgttggtgggaatgtaaaatggtgtagttgttgtggaaaagatataataattgtttaaaaaattaaatttagaatgattataatatttagtgattttatttttagatgtatattttaaagaattgatagtagggatttgaataggtgtgttatatttttgtttgtagtagtattttttttataattaaaagatgtaggtaatttaggtgtttattagcggatgaatgaatagataaaatgtggtttatttgtatagtggaatattattttgttttaaaaaggaaggagaggttaggtgtggtggtttacgtttgtaattttagcgttttggaaggtcgaggtgggtagattatttgaggttaggagtttgagattagtttggttagtatggcgaaattttgtttttgttaaaaatataaaaattagttaggtatgggggtatgtgtttgtaattttagttattagggaggttgaggtaggagaatcgtttgaattagggaggtggaggttgtagtgagtcgagattatgttattgtattttagtttgggcgatagagtaagattgttttaaaaaaaaaaaaaaaaaaaaaaaaaaaggagattttgatatatgttatagtatagatgagttttgaagatatgttaagtgatagaagttagatatgaaaagataaatattgtatgattttatttttatgaggtttttagagtagttaaatttagagagatagaaagtgggatggaggttgttagaggttgggggaagggagaatgaatgggaagttggtgtttaatggggatagaattgtagtttgggaagatgagatggatggtggtgatggttatataatagtgtgaatgtgttttatgttattaaattgtatatttgaaaatggttaaaatggtaaattttttgtgatggatattttaaggtatgtatgtaaatatatagaagtagttattattattggggttgatggaaaagaaattaagaattcggagcgttttttatattttgttacgttttacgtttaggttttgttggagagtgtgtgattgttatagaaatttgtagtttattggtaataaaaaggtttttgttagaaggtgtagaaagagtggatttgtaggattagtttattgggtagtcgagaaatttattagagggtatgggtgggtaggagttgggtgtttgagaagtttgttgaggttttattgggttagagttggggtgttggagaaatttagtatagagtaggttttattgggtatacgttattggtagttgtgtttttagaggaaaaagagattttggaattaggaagagaagttgttattttagtaaggtttggtagttttttatagtgttgttttttgtggatagagtttgatatgattgtatttggttaaggagaaagatttataaggtttcggtttagtattacggagcggggtttggtaggatgtatgtagagttaagaggtaatatatgggtaattggtatatttttttagattttttgttttttttgttgttttgttttgttttgttttgttttgttttgttttgagagagtattttgttttgttgtttaggttggagtgtagtggtatgatttaggtttattgtaatttttatttttcgggtttaagttatttttttgttttagttttttaagtagttggagatgtttattatgtttagttaatttttgtatttttagtagagatagggttttattatgttggttaggttggttttgaatttttgattttaggtgatttatttgttttggttttttaaagtgttgggattataggcgtgagttatattgtatttggtttatttttttagatttttaaagtagatttttaggtttttttttttttttttttttttttttttttattttttttttaatataagtatttatagtttttttttaagtattagttttagtttacgtattttagtatgttgtgtttttattattattttatttgaaatattgtaaaattttttttgtgattttttttttgatttatgggttatttagaagtatgttgtttaatttgtaaatagttaaggtttttttgagtattttagagttattgatttttaatttaattttattttggttagataagtatattttgtatgtttttaaaatttgagatttatggtttagaatgtgtattttggtgaatgtattgtttttatttgagaaaaaaatatgtatatatattttagattttttgagtatagagttttataattgttgattaggttaattgttagttattagtgttttttagattatttgatgtttgttttttagatgttgagagaatggtgtttgttatggtttatttgtttgtgttttttaaaatttatatgttggagtttaatttttggtgtagtggtgttgggaattggggtattagggaagtattggtttatgagggtagagttatcgtgaatgggattagttttttttgttatgtggggatatagtaggaaaaggatatttttgaagtagggagttagtttttattagatattgagtattttgattttggattttttagtttttagaattgtgagtattataatttgtttataaattatttagtttaaggtattttgttttaatattttgaatgaattgaggtggtgttaaaatttttaattatgtatttaggcgtagtggtttatatttgtaattttagtattttaggaggttaaggcgggtggattatttgaggttaggagtttgagattagtttggataatatggtgaaattttgtttttattaaaaatataaaaattagttgggcgtggtggtaggtttttgtaattttagttattcgggaggttgaggtaggagaatcgtttgaatttaggaggtggaggttgtagtgagtcgagattgtattattgtattttagtttgggtaataagagtgaaatttcgttttaaaaaaaaaaaaaaagagtttttatttatgattgtggaattgtttatttttttttttaatttttttaggttttatattatgtattttgaagtttttttggttaggtgtatatatatttatgattataatggtgtttcgatgaattgattatttaattatgatgaatgtatttttttatttcgtaataattttattttggatttaattttattgatatttatgtagtttttttagtttttttaaatatgttgtttgggatgtataagaaggttggagaggtttatggagaaatttatgatggtttgatttatagttttttaattttattatggtgcgaacgtggtatgtatatagtagaaattgtattttaagtatgtgtgaaattattgtgttttttatttttagtatagtatttaataatttatatgagatagttaatattttattataaaataggttttgtgtttgttgattttgtttaattgtaggttgaagtaagtgttttaattatgttaaggtaggttaggttaagttagaatgttcggtaagttagatgtattaagtgtatttttgagatgatatttattttttatttatgatgggtttgttaagatataattttattattatttaagtagtattagtatgtttttttttaaatagaaaattttaatttgtgtttatattgaaatagtattttttgtagatagtatatagttgagttttgttattttatttattttgatagttttcgttttttaattggaatatttaggttatttttgtttaatatagttatagatatgattgggtttagagttattattttgttttttgatatttattttttttattttgtttttttggttttttttatgttaattaagtattttttagaattttattttaatttatgttttttttttttttttttttttaagatagagttttattttgttgtttaggttggagtgtaatagtatgattttggtttattgtaatttttgttttttgggtttaagtgatttttttgttttagtttttttagtatattgggattatagacgtttgttattacggtcggttaatttttgtatttttagtaaagacggggttttattatgttggttaggttggtttcgaatttttgattttaggcgattcgtttattttggttttttaaagtgttgggattataagcgtgagttattgagttcggtttgttttgattttttaattgtatttttttgtattgttattttagtagttattttatagattttattgtatatttttagttttttatagtttatttagaattaatattgtttttttttatggaaaaaaagtgtaagaattaggtaattttatgggtttatttattattttttattttgtatgtgatggttgttagatatttattatatttatatatattgtaaattagataatataataaggaaatttttgttttaaatagttttatgtattttaaagaaattaaaagtaaaatagaattttttttatttgtttatgtatttgttatattttgtgttttttatttttttttgaagagttgagtttttatttggttttattttttatgattttggagaatttgttttacggtttttgtagtgtaggtttgtagatagttaatttttttttatttttatttatttgtaaatttttattttgttgttattttttttttttttatttttatttttatttttgagatagagttttattttgtttttttataggttatagtgtaatggtgtgattttaaaatttttgtttaattttaatttattaatttttttttttcgggtttaaacgatttttttgttttagttttttaagtagttgggattataggtatgtgttattatatttagttaatttttgtatttttagtagagatgggattttattatgatggttaggttggtttcgaatttttgattttaagtgatttgtttgttttggttttttaaaatgttgggattataggtgtgagttattgtgtttagtttgttgttatttttgaattataattttattggttatagaattttgagttgttagtttttttttttaggattttaaaatatagggttttagtgtttttggttttcgttgtttttgttaaggaattagtatttatttagttatttttttgtagattatatgttgtttttttttggatgtttttaagattttttatttaagtttgattgtttagtatttatttttgggtaaaaaagtttttagaaattagaaatttatttagttttatttttttttgttaggtgtagattttattttagtttttatttatttgagatattttatattgattttaggttgttgttattttgtttttttaaatattttgtttagagttataatgttttttgtagaattgattagatagtagttattttttgtgattaggagttttgattttttagatttgttgatgggtttataaagtttttgttcgtggtttttagttggtagtggtttttttgttttgaagttgttatgagtgtgtaaaatttataggtttaattttttttattagtatagtttagaaaagtggaatttttggtttgggtggttatggtgttttagattattggttagattagggtggtgattgttagttggtcgaatgtggggtttttagtttagtatttttggattttattttaggagttatggttgttttagggttaggggtttggttttagtttttgtttttttttttttttttttaagttgtttagtattaggttttaattagtattttttgtagatagggtgggtcggttttttattagaggggtagggttgggcgggaagtttgttgagtttttttttttgtgtagtttatagttttggggttagttttagaggggtgtagaaaggagtttttaaaggtagaaatttatttttttttttgtttttgtgtttttagggataaaggagaggtggttttagttggggggttattagtggtatgtaggaggtttatatgattattgtttgttggggtttttttttttttgtgagagagacgagagagaggagagagagtgtgagttagggtagtgtttttttttagtaacgtagatttttgtacgtgttttttaggagaaatttcgttattcgttagagttttagatttggaagaagttttgtttttttttttttttttagtgtagtgtgtgtgtgtgtgtgtgtgtgtgtgtttttatatgtattatatttttttatagaggaaataattttcgtttaagtgtaaaggttgggattggagtaggtagtatgtgggttaaaggagtagagaggaggaaacgggggcgggggtgagggtgggaataggaggtgggtagatgttacgaggtatgttttttataattagaagggttggtggagatgattagaatgttttagatagattttttattaaatttttaaaatttaattttgttttatgaagtttgaggattttgtagagtgaaagataaggaagggtttttttgtaggggggtgtgtgtgtttgtgtgtgtttgtgtgttgtgtgtttttatgtgtgtgtacgtgtggatttgtgtggtgtgtgtttgtatatgtgtgtacgtgtggatttgtgtggtgtgtgttgagtgtgtatatgtgtgtgtttgtgtgttgtgtatgtatttgtatatgtgtatatagattttattttttttttttttggtttattaagtgttagaaagaattttcgtgagtttttttattttttttaaggttgtatatggagggatttgcgtaggtatatgtgcgcgtgtatataatatatatatatatatatatatatatatatatatatatatacgagttaggggcgagtatttttgtggattgtatttaggtttggtaggaaatcgggttttgggaaattgtaggttttatttttggtagaaaattatgtttttgttgttgttcgttgaagggaatattaagtggggttggggatagtttatgttgagaagagtaaattttgtttatggtattggggatattgagtggtttttgtttcgggttttggagggtttgggagatacgtttgtagttttgggtattttttaaggttacgggcggttatatttaaggttaggtttttttttgtgtgagttgcggttagtaggaaggttgattttagaggcggttttagggtttttggaggttttgtttttgagatatgggttaaggttagagagtcgagaaggttgttgttgaggattttggttggcgtttagtttagcggttttttaggcgggttttgtgtaggggttgatgaagttagttgggaaatttgtgaaataaagtataggttttttaggtttgtttagagtttcggtattagatgaggtgtagagaagggaattgagttgttaagtgtgaataggagagaggagttttaggattatataggggtttcgatatggtaggtgtttggttagtagcggtgttgtttttattgttggacgtgggaaaatgtattgatatttgttgattagagtcggggtgagtatttgggtgattttgtagatgagataaaataagggttgtcgtgggggaggggtttttgtcgggttattttgttgaggttttgtgttattgttttgcggttgttataataaaggattataaatgaggtgatttaaaatattcgaaatcggttacgtgcggtggtttatgtttgtaattttagtattttgggaggtcgaggcggttggattacgaggttaggagatcgagattattttggttaatatggtgaaatttcgtttttattaaaaatataaaaaaaaaaaaaaaattagtcgggcgtggtggtgggtgtttgtagttttagttgtttaggaggttgaggtaggagaatggtatgaattttggaggtggaggttgtagtgagtcgagatcgcgttattgtattttagtttgggtgatagagtaagatttcgttttaaaaataaaaataaaaataaaaataaaaatattcgaaatgttttttttaaagtttttggagttagaaattttagatcgaggtgtttgaaggtttattttttttgggggtttcgagggagattgttttatgttttttttcgagttttgcggcggttagtaatttttggtatttttcggtttgtagttcggtttattttttatttggtttttattttgtgtttttttttgtgtttttgtttaaattgttttttttgttgtttttttaatttatttttagggataggtttttattttgttttttaggttggagtgtagtggcgtgattatggtttattgtagttttagttttttaggtttaagtaatttttttattttagttttttaagtagttgggatataggcgtacgttattatgtttggttaattttttaatttttttgtagagacgagggtttaggttggttttaaatttttgcgtttaggtaatgagattttgttttttaaaatattgggattagagatatgagttgttgtgtttagtttatttttgttttataaagatatttgttattggatttagggtttattttgatttaatatgtttttaaataatttaattatatttttaaagattttatgtttatataaagttatatttataggtattggggggttaggatttgtatatgttttttgggggaatataatttaatttataatgggttttatttatagaacgaacggtttttttagggtgtgcgtaggtgggtgaggggtttaggagagggatttgcgtggtaagagggtttgtgtttacgttagagattttagaaggagattggatggggtggttgtatggagtaaggggttatagttattgtttttaagtagttggtgggttgtttggtagaaagggagtatttattttgagtttttttaagatatgaagttagtattaggtatttggaaggtgttagcgagtagagtttgattttttatagaaagaggtgttttttttataatgtttatttgaggacggtggaataggttattttataaggtagtgagttttttatgtttggaagtatttaagtaggggttatgtgggagttgtttaggagtgtatagaagggattttagaggtttttgttaatattatttttgtttgttttattttacgataatttgaattttagaatgtaatgttattggggatatgtttattagaggggtttttagtattaggttttatatattatgtattatttttagggtagggaatgagagtaggttttattttttttggttgtttgtgaggattaggaggtttgttgttgaggtagttttttgtggaaatagtgttttagtttcgtaatttatttatcggagttttaatattttaatgaaatattgtgttagatgggttttgggtatgtgtgtgtagattgttataagtttatgagaatgtatatacgtatattgtatgtgtgtgtatatatgtatgtatatatgtataagaatacgaagattcgaggtaggtatagttcgtgagatagatttttttaggttgaaagattttttataagggtttttagaataaggttttagtttcggtagttttttttatttttggtgggaggatttttatagagaagaagggttaagaagtatagtttttgatgtttacggtgtattaagttttgttttaagtttgtgttttattttttatttatttagtaaatttgtcgtttttgttttgtgttagatgttgtttttagtattttataaatattgatgtatgtttgttttatgataattttgtgaagtaggtagtgttatttcgttttatagatgaggaaataggcgtagagggataaagggatttgtttaaggtttgtttttattttatacgtatatgaacgtttatttatgcggtaggcgttagtttttttttgatgtgagttaggttttgagttggttggggtttgggttttattttggttgtgttttgttgtgggtattaaggaagtttttagtagttttatttttttggtatgatttagttttagggattggatttttttaaatgtttttgtttagtttggagttttttttttagttgggggagggttgaacgattttttatttttggaggttgtcggagttttttttgtttgtatgcggtcgttgtcgggtggataggtttgtttgtgggttgaggtttttagtagttggggtggattatttttttttttaagaagttttgggagaagtagttgagggggttagcgtttttttgaggttaattttttgttttttttagcgtaggcgcgaagttatttttgtttgtgtgtttgttatagatagtggagggcggtgtaatcgtgacgtttgtttgttgtattttgcgtttttgaggacgttgatttttggtcggtgttgggcgtttgttttttagttattttgttttgatttggcgtggtaggttcgagtattgtttttttataaggaaataggtttagaggttttgagttatttgttcgggtttttttagttaataattggttgagttaggatttttatttagttttgtgattttagaagtttaagttttttttattacgttagggttaggaaaggattagaatgtttttttacgtgtcgattatttggatgatttgtgtagtttagttcgttgtagttgtttaataaaaatgtggaatgaatgggtttatatgttttattgtgtgatttagagttaatgattttggttgatttttttgtttttatttcgtggtttagtatttttttttggggtgtgtgattttggaagtagtgattttttttattttattttgaatggtgtttgcgtcgtagtaggggagtagttggggattgttagcgtttgttgttggtgggttgtgcgttagatttcgttttggatgtgtgggtgattgttagttatatgtgtgtgaagggttgtgcgtgtaggatttgtgtaaatgtgtttttttttgttgttagtttatgggaggttgttaagattttgtttttgtatattagtttatattttttttgtggtttattgttgtggttgtttttttgtgttacgtggttgtaggtatagtttttaagtggatggggatcgtgggttgaatgtgtattagatgtttttgttttttggtgggtggagatttttaatttatgtatcgtggttgtcgtatttgaaaggttttttatggtgaaggatttggatttgagtaatttttcgtagaggttttagaagtgttttttggtcgggcgcggtggtttatatttgtaattttagtattttgggaggtcgaggtgggcggattataaggttaggagatcgagattattttggttaatacggtgaaatttcgtttttattaaaaatataaaaaattagtcgggcgtggtggcgggtgtttgtagttttagttattcgggaggttgaggtaggagaatggcgtgaatttaggaggcggagtttgtagtgagtcgagatcgcgttattgtattttagtttgggcgatagagcgagatttcgttttaaaaaaaaaaaaaaaatgaagtgtttttagtttttttttttgtggtgaggttttgagtttttatttttagaagaaaatttggttggggagggtatttttagattcggatataaacgttaggagattagggttgtttttttaggtgattaattatagagatttagggaaagttacgtttggaagaggcgatattgtgttttagttttatttatttttttattttatagatattgtttggtgtttagttcgtatcgcgaggttttttaagtagttttgggtatcgtgtatttggtatggtttttagttttatttttttgttttgggagattcggtggggatttcgggttgagtttttgtggttgtggaattttggtggtttattgtggtggttgagaatagggacgtggggttggacgggttgagtgtaatttttagtggtttcgtgaattgtttgggagttttgggtagtttttttttattttgtgttttcgttttttgatggaaaaatgggggttaggggggagcgattttgaaggtattcgtgggaattaagcgaggtgataaatgtagtgtttttggtagagaattggatatagagtttatttttatgaagggggttgttttttttttttttatgtttttttttgtttttatttttttttttgtattttttttttttgtttttttttttttttttttttttttttatatgtaggtatattttatttggtgttttaattgtttttttttattgtttttttgtaagtggttttttaagtgggaatttaggtttggaaagggtgggtattttgtttggtgggttttggtaggttaggcgttgagtagttttaggagatataattttaggaaaaggtttatgtaggttggttgttatgacggattgttggtgggagaggggaaggcgtcgtggtaggggaagttttggaaatatttattagtggttttatttatgatttaggatatttgttaggttattagaatatagttgaggaagttgtcggttagacgtttagaagtattaatttggtggttgggttgtggggggatttttttggataggtagataaggtgtcggaggaaggggttgatatttatttagtgtttgttatgtattgagggtataaagggtaggatggagagttggtttacgttatttgtggaattttttaggtgtgggggtagatggggaagtaagggggtttgaagatatatgcgtttattaaatgtttttaaattttaagaagaagaataaggatatatttataggggtagggttgaaagtttgatgtatggtgttttggggtttgtttttgttgtaatagttatagtggtttttttttattttttttttttttttattttgttgtgaaaatgtttaaaatatatggttaagttgaaagtattttatagggaatatatttagttattatttagattttattattaatattaagttatatttgttttattattttatcgtttatttatttttttttcgtttggttatgaatttattttatttttattttttggtgtattttaaagtaattttaggttattttgattatttttggaattattgttagaaatttttttttttttttttttttttttttttttttttttttttgagatgggattttgttaggttatttaggttgaagtgcggtggtgtagttatagtatattgtagtttttaattttcgagtttaagtaatttttttgttttagttttttgagtagttgggatcgtaggtatttattattatatttagttttatttttaaaattttttattaattttttattttttgtatttatttaggattattttttataaagttagggtgttgtaggaggggttagaattttaagttttaattttggttttgttattaatattgtgcgatttttagtaaattattttgtttgtttaggttttgtttttatttttatgaaacgagggcgttaaattgtatgttataaataatgagggttattagttattaagtttttattttaggttaggtattttttatatgttattatgagtttttttaatttaggtattgtttttaatggatagtttagttaacggaagtttagagaggtggtgtaatttgttaaaagttttattatttagtgaatgtttttacggggtttgtatttaggagtttgatatagagtttaggttttagtatttggcgatgttttgggggtgtgagtagtttagtttattttgggtacgtgtttatttgttgttttttttgttttatgtttgtgtttgttttttttgaagtttagattgttattttttagttttaaatattaaaattggttaggtacggtggtttatgtttgtaattttagtattttgggagattaaggcgggtggattatttgaagttaggagtttaagattagtttggttaatatggtaaaattttatttttataaaaaatataaaaattagttagatatggtggcgtgtatttgtagttttagttatttaaggagaatttagttatttagttattgaggtacgagaattatttaaatttgggaggtggaggttgtagtgagtcgagatcgtattatttttttttaggttaggtaataagtgtgagattttgttttaaaaataataaataaataaaataaaataaaaattaaaattaaatgttaaaattaatttataaaataaattttggttaaagtagtttgtttattttgttttaattatgtatattgtattagattttgttaggggtttagcgtataaagatgagatttttgttttgttagataggtgggatgatggttatattttgagttagttaaggtattatttggttgtgtaataaaagttaaaatattagaggttgagtagtattcggatttacgttttagtttaagtgttagtcgttatgggggtttaggatagttcggatttagtttatttttttggtgtattttcgatatatagtttttattttttgagttgagatggttttagtttttgtcgttatgtttgtattttagttagagggaagggaagaagggagaggggaaagggtaagtgtttttttttatttttaagggtatgatttgaaagttaaatattttagtttttttttattggttagaatttagttgtatggtcgtttttgttattagggaggttgagtaatgtattttttagttgggtttttttgtgtataattaaaattttagttattatagaaaaaagggagtttagatattggggaaataattagtatttgtattatatgtattgatagttttttttgtatgaatagagttgtggtaggttttatgttagggagaaagtaagattggaaaagagtttattaaggaggtggtatttgtattgtgtttaaggggtaagaaaaacgttttttaattaggagttataaatgtttggttgaagtgttattgtttttttattttggagttggaatagacgttattagttaattatgatggttgttgggtgtattggttaatatttataattttagtattttgtgaggttgagggtgggaagattgtttggggttaggagtttgagattagtttgggtaaattgtaagattttgtttttgtaaaaaaatataaaatgtagttgagtgtggtggtatttgtagatttagttttagttattcgagaggttgagatgggaggatcgtttgggtttaggagttcgaggttgtagtgagttatgattgtattattgtattttagtttgggtgatagagtaggatttgtttttaaaaataataaaataaaattaaagttttaaaatggaaaaaaaattatgagtatataattttagatgtatttttaagatagtaaattcgggtgggcgtagtggtttatgtttgtaattttggtattttgggaggttaaggtgggtggattatttgaggttaggagtttgagattagtttggttaatagttttatttgtattataaatataaaattagttgggtatggtggtgggtatttgtgattttagttatttggaaggttgaggtaggagaattgtttgaatttaggaggcggaggttgtagtgagttaagattatattattgtattttagtttggagaaaaaaagtaaaattttgttttaaaaaaaaaaaaaaaaagtaaatttagggttaggtttgtagttatatggttatttttttttttgagtatggaggtagttttagaaatttgttttatattatattagtgggtagttgattgggttagtttgttagttgaattttatttgttatagttattttttatagtaaggggtattttagatatatttttttttttagggaagaataagtcgtagttgtttgagcgttttatttagtggtgtgtatgtttttttttaattttgtgtttagtgatgttttgtttgtagtttgaaatttgttatagtgggtgtgtttatattataggaattggtaaatattatatattaggttttattttttgttttttattagggtaggttgttttttttttgttgtttttgttttttgtttttttttttttttgagacggagtttcgttttgtcgtttaggttggcgtggagtgatgcgattttcgtttattgtaagtttcgtttttttggtttatattatttttttgtttgagtttttagaatagttgggattataggcgttcgttattatattcggttaattttttgtatttttagtagagacggggttttatcgtgttagttaggatggtttcgattttttgatttcgtaatttgtttttttcggttttttaaaatgttggtattatgttattgcgttcggtttagggtaggttgttagaaatgtattagtttgttagttttagttttgtttgttttttattttttttttttttttttttttttttgagacggggtttttttttgttgttttttaggttggagtgtagtggtgtgattttggtttattgtaatttttgttttttgggattaagtgatttttttgttttagttttttaagtagttgggattataggtgtttattattacgtttagttaaattttgtatttttagtagagatggggttttattatattggttaggttggtatcgaattttttatttaaggtgatttattcgttttggttttttaaagtgttgggattataggcgtgagttatcgtattgggtttttttcgtttttttttaatgaaaatttttttgaaagatttgtttattgatgtttgtgttaataggtattgtttgcgggatagagtttgttttttttttgaaggtttttttttgtttgggtgattatttgtatgttattttttgttgtttagaattaaagatgtagttatgtttggggtaggttgggaaaatttgtgggaattatagagtttgttgttatgttgtgttttggatatttgaagtttggtaggtaggtgggatcgagggtgggtattaggaaagtgatgtggttttataggaaggggatataggttttgagattttaggtttttaattggataaagttgttttttttttttggataaatgttttagtttatttataatcgagtggttagtttttttttttttttttttttttttttttttgagatggagtttcgttttttcgtttaggttggagtgtagtggcgttatttcggtttattgtaagtttcgttttttaggtttacgttattttttcgttttagttttcggagtagttgggattataggcgtttgttatcgcgttcggttaattttttgtatttttagtagagatagggttttatcgtgttagttaggatggtttcgattttttgatttcgtgattcgttcgtttcggttttttaaagtgttgggattataggcgtgagttatcgcgttcggttaagtggttagtttttttagttgtcgggttttgtatattttgttggttttggagattatatgtattatgtagattttatttgttttttatttttagtgttgggggaggggttaagggtttgtcgatgtgttgatatttggttatttattggttttgaatgtttatatttatttttttgaaatcgatgtttcgtatcggaggttttatgtggatttgggggtagaggtttgtattttagatggtggggtggtttttattaattaggtagattttttgttttgttttgttttttgggttttgtagttttagatgtgtgtttaagatttgtggttatatggatgggataagttatagagatttagatttcgtggtttttgtgattagagtagtcgtggttttgtttgggaatgtttttattttgttgttgaaggtgagaaatttttttgtgttggagaatagttgtgttgagaagttggtttatttggtttgtaggattgttggggtaagggaggtttgttgtcggttttttttttttttttttgattgggtgttttttgtttaggttttttgtagtaaaagaattttttaatttattttgtttttttattgagtttttattttatgaagtttattttttaattttagttgattggtttttatttttttaagaggaaggttaggggtagacgaggttgaaggaggttgatttttttgtgttttcgtagtttgagttgatgttgttgtatgtttatagggtttttttagtttttaaaaaggttttaatacgttcgttatacgtttgtggtttttttggatgttatattaatttagtaaggtttgagttagaggttgtttttgaggttgtgaaaatagaagaagggtttagaggagaatttttttatttgacgattttaggaaggttttttagaagaagtagtttttgagttgagatttgaagatagattaggtttgagttaggttagggagggtgtgaggggtttattaggtagagggaataggatagggtaggtatagaggtttggtatttggtttgtggggaagtgtgagtttttgggtatgattaaggcggggagaagtggcgtgagaggaggtagatgtggttggtaggagatcggcggtttcggttttgttgagttttattttgtatgtattaggtgatagaggttgtttaggacggtgggtagggaagtgataggttatatggttattttattaatagtcgggagtttagtttggggggatttaagattttggggaaggtacgagttaggggtttgttagagttaggagttagtgggagaaggaaatagtgttgtttatgaattataaatagatattttcgtaattttttttgacgtgatataattttaaagtgggttatttagaggtgggaaggtgatttttggttttttaggttttgggtttgttttttttttttttttttttttttttttgagatggagttttattttgttgtttaggttggagtgtagtggtgtaattttggtttattattatttttgttttttgcgtttaagtaatttttttgttttagttttttgagtagttgggattataggtatttgttattatattcggttaatttttgtatttttagtagagatggtgttttattatgttggttaggttggtttcgaatttttgattttaggtgattcgtttattttggttttttaaagtgttgggattataggtatgagttattgtgtttagtcgagtttatttttaagttttttttggtttttagtgtttttgtattagtttatttttttggttttttgtttttaagagttttttttaagattgtttttaagtggataggtttttagaattaaggagtagttttaggagtttttagttatagatattttagggggttcgtgtggtttttagtttttggtttggtttcggtagttttggttttttgtgttgttttttatatagtttggttagagttggttaggttttttggttgggtcgagttatcgtggttagtgatttatgtagggggagaaaagtgaggagggggaatagagtgcgagggggattgtgttaataataaatttattaggtttttgaggttattttataggagggataaatggtttatttaggttgatttggttgtcggttggtttttagagatatttagggtggggaagattttattatttggggaaagtaatattagattgtttggaggggtttagttagcgtatttcgcgttttttgtttgttttttacgtagagcgttttgtttttaaggcggtaggttaagagcgcgagtcgaggtttaggtgtaaagaggggtgcggtatgggggtattgtagggtacggggtgtatgtatttttatttatttttttattgagtgttagggtaatttgttaatggggtatatttggtgatataaaattttttgtcgatttatggtagtttggaacggagtggaagcgttttatttttggggaatttttatatatatttggttgtgaacgtcggtgtttttgtattggagtttttttggagtgtgttgggtagagcggagaggtttttttttttttttttttattattttgtggaggtgttaatatgtagttagagatggttagtggtagtgaggagaggggggtaggaagagattagggttgggggtttgttagtttatagttttatttttgaatatttatggtttttttgtttaggttagcgaggttgggggtagagacgggtaggggttttttaatgttgggtattttttcgtttttttatattttggatttgttttttggagaaagttttggagtatttagaagttttggggttgttggttgaggtggggagtagagtttagttgtgtttggaggttttttatttttatttagtttttagggatagttttagttgtgtaggtttaggtcgttgaggttggttttagaaatttttttataattattattggatggaaaattagttttttaaagggttttagagttagttttgtttttttttttataggtttttatagttagagtatcgggtttttgttagagatgtagaagagacgatgtttttagtttttatgtggttcggtttttattgtggatgttggtgattttagttttttttttaaaattaagagggttgatgttttatattttaggtttttagaaagagtcgttatttatttatatcgttatattttttttttatttttttgtttcggaaagagtagagtggatatgcgtttttgtagaaatttatttatagtttgattgtagatgtattttgtttttttattgagtttttgttttatgaagtttgttttgtttgtatttttttttttttttttttttttttttttttttttttttttttttttcgtttttttttttttttttttttttttgttttattttttttttttttttttttttttttttttttttttttttttttttttgttttttttattttttttttttttttttttttttttttttgaatagttaaagatagaatgaatggtataggtaggtattgagttttttgtaattggaggtgtttaagtgtagggtggatgggtatttatagggtaggtattgaggaaggatttttttgggattgtggatggtaggataggttttgtggagttttttgagcgggtgtagaagagggagggtatgtttttgttttttgtttttttcgggttgttaggtcgttatttttaatttttattttttttttttttatttgttgggttttacgggatgggtagaggtattgttagaatatggagtcgcggtttatagagggttagtagggaggagagttttttggggattacgtcgttttagttattgtggtgattttgaaaataaatgtttttttttttgtttgagtttttgttgtttttgttgacgtggaattagggtaggttggtgatttagtttttatttttgtattgtatcggtggtaagttgtttttagttttagattttatagagtagggtgttttttttagaaaaatagtagggaggttaggatattaagggttttagggatagtttgttttttttggttggtatgagttttagttaagttttttggtattttgggggtgaggaggtattagttgtgtgttttagttattggttgttttgaggttgggtcggtgttaggttggttatttttttttgttttttagtgtgattttgtagagttttcggaagggttagagggtttttttttattattggtgtttatgggatattgtgtttttattttatttttgtattttagttttagacgggtgttaggaagttggagattttagttattttacgattgtgttttgcggggttggagtaggaataggagtaggaggaacgttttggttatgggattgtgtgaagagagaaggattaggaagaaaatatgagttattatgtttgggttatattttagtagagtcgttggtggttttttaggtatttgaatttattaattataaagtttattaggtgtgtaaataaataaatgttgtttaggaggtatagttagggttttgttggagagggattattttggaggggttatattttttatttagttttttagtttttttgttttgtgtgtgtgtagtttttgattattattatttttgtttttgttatttgtttttagggttttattaggttggatgttattgtaataaaatgtagtaatagaaggtttaggtagtgttgtagtttttggtggtattattagagttagtaggtagtagggttggggaattttaagttgatttagttttaagtgtcggagcggggagttcggatgaggtgggggtggggaatcggggagttatggagtagagtatttgttgtgttgaaggttaggagtttttttgggagattatgaatttagaatattaatattttgtttaaaaagttttttgttttggagataagagtttaggtcgttgtggttaggttttgttgtaaatgttttgtataaagtaggttggggggattattgggaagtttggggaatagattggttatgtgtttttttgagtgaaattttatggttgtattgaagcggttaggtagagggtgtgatggggtgtggtagttgtatatcggtttagttaggttgaatggggaaatgtaaatttaggtggtttgaaagagatttagtggtttatagtttggtggttgtttttagtataggtgatgtaaagagagaaggggtttcgggggtttggtttaggtggaaattatgtattgtttgtgattttgggtatgtcgaggttggagtaggtttgtttggtggttggtagaacgtatatgaagaatttatgtgtgttttgaacgttttttttgtttttttgggtttatgttttattaggagtttttcgattttgttattttgtaaaggaaattgcgttttgttattgtataggatcgaataggtgtgtgtggagtttttaaagttattgttttaaggggttttatgggataatgggagagttgttgtgatgtttaagattaaagtgatggttgggcgtagtggtttacgtttgtaattttagtattttgggaggttgaggaggatggattatttgaggttaggagttcgagattattttggttaatacggtgaaattttatttttattaaaaaaataaaaattagtcgggtatggtagcgggtgtttgtaattttagttattcgggaggttgaggtaggagaattgtttcgatttgggaggcggaggttgtagtgagtcgagattacgttattatattatagttcgggcgatagagtgagattgtttaaaataataataatgttaataataaataaaataataataataaaataataaaagtaaggatttgaataaatatttgtatatttatgtttgtagtagttttatttttaattgtttaaatgtggaaggaatggatatataaagtgtgtgtatatatagtggaatattatttagtttttaaaaggaacggaattttgttattatatgtgaattttgaataatgaattttgaagattttatgttacgtaagtttgttttataaggataaatattgtatgattttatttatgtgaagttaaatttatagagaaattggaatgacggttgttagtagttaggggaaggaaggatggggagttattgtttaatgaggatagagttttagtttgggaagttggaagaagtttcggaggtggatggtgttgatgggtgtataatgtgaatgtatttaatgttattaatatggaaatttggttaaaatggtaaatttgttttttttgtttttgttttttttttttttgagacggagtttcgttttgtcgtttaggttggagtgtattggcgtgattttggtttattgtaattttcgttttttaggtttaggcgattttcgtgttttagttttttagagagttgggattataggcgtttgttattacgttcggttgatttttgtatttttagtagagatagggttttattatgttggttaggttggttttgaatttttgattttaggtgatttatttattttggttttttaaagtgttgggattataggcgtgagttatggtggttggttaaaaatggtaaattttatattatatatattttattatagtaaaaatgtattgttttattagaaaaatgatagatttttataatatgaattaaattataagttatgaaggaaaaattaagtaaaatattaaaaaattatttataagtaattatatttaaaataaaagataataaatatataatttttattattttttaggttttttgtaatatttaattattgtttgttttgttgcggttatgtttttgaggttgtatttgtatgatagaaatattatattcgtggtgattaaatatttttttttagttttatttttaatgatgttatatagataatttgaaattggtcggttgggtacgatggtttatgtttgtaattttagtattttgggaggttaaggtaggtagattatttgagtttaaaattagtttggttagtagggtgaatttttatttttagtaaaaatataaaaattagttaggagtggtggcgggtgtttgtaattcgagttatttgggaggttgaggtaggagaattatttgaatttgggaggtggagtttgtagtgagttaggattgttttattgtattttagatcgggtgatagagtgagattttgttaaaaaagaaaagaaaagaaagaaattggttaaggtaggaatattgatattataggaataggtaagcgttataaatcgggaaattgagtgttgttgtttttgttggttttaggtggtcggttgttgatcgttaattggtatattattggaggagggaggtttagattgattcgtagagagattagaggtagaaacgtattatggtttggatgttgagggtgagggaaagagaggagttaatagtggtgttcggagatttggtttgagtaattaggtggatggtagtatcgttttttaagatgaggggttgtgggaatttgaggggttgtggaaggttttgttattgacggatttagggttcggtagttttgggaggtttattttgtgttaggttacgtagagataagattatttgggttttgtttttgggaagtttttgtttatgaggatatagtttgttatttaatggggtgtttcgtttggagttttagtgttgttgggagaaagttttttattttttttcgtttttcgagttttttttgtttttttgttagttgagtttttttatggaggttgtgtttggaggggggttatggatatggatgtgtgcgttaaacgttgttttttcgtggattttttttttatttcgtttttacgttttgtaagttttattttttcggggtttgatttgtggggtttttttttagatttgtttttttttatttttagaaaggcgtgtaggggttttttatggtttttttttttgtttttatttttttttttttgggatagtgatttgttggacgggtgggttatttatagggtttgtgattgtttagatatttttgttgtatgaagttttgattttaaggtatgatgtagatgggaataaggtacgagttttttttggttgttgtaataattgtcgaaattgggtggtttatagtaaggggaatgtgtttttttatagttttggaggttagaagtttgaaattaaggtgttagtagggttagttttttttgaagattttaggggaaaatttttttttgttttttttagtttttggtggttttaggtgttttttggtttgtggttgtattatttcggtttttgtttttgtttttataaggtttttttttgtgtttttgtatttttttttttgttttttagaaggatatagtattgaatttagggtttattttattttgagatttttgtttaaattttttttgtagagatttttaaatagaattaggttatatttgaggttttaagtgggtatatttttgttttgggggggattatcggtttattgtaggtttcgttgtgtattgaagacgtaggcggtttttttggttaggtttgtagtcggttttgtttttttttgtgatcgtggaagaatgtattttgttggatgtataggtttttatagtttttttgtttttgttaaattttagtttagttttttttttgttgtcggcgtgtattttttttgtttagtgttttttttgggattgtgtgtttaggttttgaggttttagaaaaggggggtggagggtttttttattattttgtagtaatgaggttttattaaaattttggagttttagattggatttagtttttagttatgattaaaggatagttcgggatatgattaaagggttagagaaagatgatttaggttgagaaagaggaggttaaggagtaattggattgtttttgaatgtggaaaaggtaattatgatttgaagggtggtgtttagttgttttttattttttttgaggataggaaaaaaaaggaaataaatgatgtataattagagtagttggttagatacgagggtgaattttttggttgggagtatggttaagttttgatttgggttttttgaaagagttcggggaatttttttatttggaggtttttaggtttggttatgtggttttgagtgattatattgaaggggtagtggttggggttggagtcggtgggttttgagtatagttacgaaggtatgcgtattttttggttgtttttttgttattgttttttgggtttttattttggtgaggcgtgtattttggcggcgttttttagggaattaaatatgtttgttgtattgtgcgtggagatggagaatgtataattggttgattttgtgttaatttggtggaattttatgttagttttgggaaagaataattgtatgggtgtgtttatatttattaggtgttttttagaaaaatattcgagaataatgttgtggtttaggatggttgttgtgtcggattcggtatttttttaggggggttgtgttgttgggttgagttttttaggtattggatttttaaatttttaaatacggcgtggataggtggtttagtaggggttggattattcgataggtttaggtgttggagtttagataagatatattttggtttggcgtggaagatacggggtgttattaatggtagtaatggttgtatttttgaaattcgggtttttaggtcgacgagggtgtgtacgtatttgaaatgtttgtggttttgtagtttttatgtttataaatttatttggttgaaaatagtttaaaatatttaaagtatgagggagggagtgtttgttttttttaaaaaggaaggatttgattttatttatttaaaaagttatttaaatttagaatatttttcgtaagagattttttgtttttcgtttttttagaatggttggagagttttagtatttttgtatatttgggatattttagagggggtggggaggggtaagtgggtagcgagcgattttagatttaggatgagttgttaggcgtttttcggttatatatttaagggatcggagtgtagttgtagcgttgcggtttgttgtttcgggggtgggggtgttgttttatgttgtgaatttttatatggtttttgattttgggtagaggtcgagggtttaagggacggggtgatagggagagtatgtaggagtgggtttttggttttttagggcgagtggaagaagcgttttttttttttgtaggtgatagatttggggggttttttttgaggatgagagtttgttgttttttaagttttgtgtttaatttaggtttttaggtttattttagtttttcggttttgtttgttttgtggatgatatagtttaagggtagagatcgttggtttggagggaaggttaggttttaggttagggtttagaagggagggagaagtttttggggtagttttttttttgtttatttattgtttagtttttttttttatattttttttcggaaacgtttgtttttgataaggtttattttttgtttttaggaggtttttattgtggaggaagggaggcgtcgttcgtttttggtttttttgatagtcgtgttttattttcgttttgtgttttttttttcggatagtgttttttttagggtttatttaggagggtgtagcggtggttttcggggcggtggtcgtggtgggggtgttagttgtaggggtgttttcggtgggtgggagttggtggtttttcgttggtgttatgggattcgtatgttcgttttgcgtttttcggtttttgagtttataggtcgggattttgtttgttagtcgcgtgcgttgtcgtttaatttttgtaggcgtagagcgcgcggcggcggtgatagagaattttgtttggttgtttaaatatagttttttgtagaaggattttgcgttcggggaaggggaggaatttttttttttttgggcgttcgtttttttcgttatggttcggtttttatattcgtttatatttggtcgtagcggggcgttcggggggaggggttgaggtcgcgtttttcgtcgttttttgggcgcgggttaggcggggaggaggggggcgtttcggtcgtgtgtttaggattgttttttagcggttattcgggttttagttttttaggtttggttttgataggcgggcggagtagttagtgcgagatagggaggtcggtgcgggtgcgggaatttgattcgttcgggaggcgggggcggggcgggggcgtagcgcgcggggaggggtcggcgttcgttttttttttttatttatttagttgagttagggggtttaggggttttttcggcggttagttttgtattgtaggagcgcgggcgcggcgttttagttagcgcgtagggttcgggtttcgtcgggggcgttttttcgtcgttgtttttcgcgcgattcgttgtttattagttattatgtcggatttcgcggttaacgcgtagttggatgggattatttcggatttcgaaggtgggtgttgggttggttgttgcggtcgcggacgtgttggagaggattttgcgggtgggtttggcgcgggacgggggtgcgttgaggggagacgggagtgcgttgaggggagacgggatttttaatttaggcgttttttcgttgagagcgtcgcgcgttttcggtttcgtgttcgcgtcgtttacgtgggggattttgttaggggtattcgcgtagattttgcgcgtttttataggattttgtgttcgttttgcgtattgtcgtttgggtttttttttttttattgttgtttgtgtttgttaagcgatagcgattttttcgagggttcgcgaggttgtttcggaattttttaggacgtatagttttattttgggaaatttatcggttttttttttttggtttttttcggcggttttcgggtttcgtttggattcggtaacgggatagggaggtcgttttttattttcgattgagtggatagtcgcgttttgttcgggtggatagttttttttttttttacgttagtttcggggtcgttaagttgtgtagttcgtgggtcgggagtatcgaacggatatagtttaggtcgtggtagggtttagagtgggatgttttatggtttttatttaggtttggggatatttttattcgttttttagaatcgggtcgtgggggatagaaggggtttgcgtgcgggtagggagagtattttggtttttttttgttttcggggtttataaagtgtgttgggatttgcggggttgttttgtttaagtttgggtttggcgttcgcgtttttgagtttgtgagtgcgtgcgtttttttgcgtttttttgattgtcggtgttggggttttgcgttttgcgttcgcgggagtaaatatagtaggcgaaggggaagtttatataatggtttttagcgttttggggtagggtttttgaggggcgggtttgtttttgtcgggatttggagttttcgtttttcggagaggtttttaggttgatttgggtagagttttttggtgggtcgggagggggaaaggttgtgttgaaatgagtaaattgtttaggtgttaggttaagttgggaggtgattagtttgaggtttttttcgttttatggttagaattagggttgatatttgggtgttttgagtttagttgtttatacggtttatttggggttagttttatttgagtgggggaggcggggttttttgggggattagaattttggttggacgttaagtagagtgttagtggttgttttttagggttgggtttgaggagggtgtggggcggcgaagggacgggagggggttgtgatttagtggttattggcgttgtgtagagtgtgagttggaaatatcgtagttattttgttagtttagtggtgaaagtttttttttaggttttatttttttgtatttttgttttttagagggaggggaggtttgggtttgtagagttgggagggtttgttgttttcgttttttttttttataatatttttttatttggatatttttgggtatatgtttatattggggtttttttaggtttattgtgtttcgttgagttttttgtagttttcgagtgaatgtgatttttttgtttttgtttttttgtaatttttttttgcgatcgtttttttaggggttttttttgttttaaatgtttaagtggtacgatttagtcggtttgattattttttagtaagtttttatggagagaggttttgtgttgtgtagagttttttttttgtttgcgggatcgaggtttttgtttttagtttttaatagaaagtgtcgggtttttagtgggatttttggggaagaattttcgtgttttaacgggagttttgtggcgggaggggaggttagggtttggggttgtgttcgttgtatagttgttattatttgtattatgaaagttgttagtgttttttttttgggtttttgggtgtaattttatttttgtttttatgtgtttttatttggagttgtttttgcggttgttttttaagttagttttgtgattttgtaatttagtttaagataatgggtttattgagattattttggtgtagtagttggtaattttttggttttgggggaaggttttttagtttcggggagtggggttttaatttgttggttttttgtgtttattagttttttttttgtgtgttttgaatggttttgttgggaattttggttttagagttattaggtggttcgagtcgataggcgtgagagagtgtgtgtgtgtatgagtgcgtatgtgtatgggggttgatttggggtatggaaaggtggttttttttggtgtttaaggagtttggagtatagttggagggtgtgggggtgtgtatatgggagttggataattttgggtggatagatagacgtggggaagggatgattgaaggaggtggaggagagagtgtgatttagtttagttaggggtgatgtggataggtagttttcgaattagggtagagaaaagttattattagttagtaggggagaagttagtatggaggaggcggattttgagggagagtaggaattggattgtaagaggaaggagagttttttggttagtagtagttagtagtagtgggggaggttggaatgagttggttggagagggggttggggtataaggaggggtttgtttgtgaagattatatgggttaggttgcggagggttaggtatgttcgtcgggagtgtagttggtttacgggaagtatttggagtggttgggaatgggcgtaggagtagcgtcgtgggagtataggtttttttttcggggcggtttatttggtgttttggtttttgtaaggtaggtcgaaagggtggggaggaaattgttagttttttatagcgttgggatggtggttttagggtttttgaggttagcggatgtgggtgtttgttattatgtgggttgttgaggggcggagattttaggggttattttaaagtaggacgagttttgagttacggtatttttgggggtagttttttaatcgagtagacgtttaggtttggaattttgtaatagaggttatagggttttgattagggtgttttgggaggtttagaattagtggtagtatatagggtagacggtaagtgatttggtatggggaaagaggtaggtgtttaggtcggtatagtatattcgtaaggaataggtagacgggaagtcgttcgtgggtttgtgtgtgtgttcggagttaaaattttgttaatgttttatgttttgggtatatttattttttttttggggagtatttttttttttatttttttttttttcgtttgttttttttatttagggttttttttatttttttcgttttggggatcgagggtattatggttttatgttttattatcgatgagttgtatagggatttagttttttcgttgtttaggtcgggttttttaggtttagggtttttaggaatggagagggtattagtgttttttatggatttaaatttttcgtatttcgtttttgttttttttttaagataggttttcgagttttaaggttttagggttttgtggaggtcgttacgtagtagtaaggagaatgttttgtatttggttgatgagatttttagagttttattttttatttttttattgtataaacgggtttttaggcgattgtagtattcgttattgttcgtaatagggtgataagagggatgattttttttttttttttttttttggttggtggaggtacggggttggcggacggtatgtgttttcgtgaatttaggttaaatttgttatcgtaaatacgattataattcgggtttttgtgtaataaaagtttttttaagtattagttgttggtttgttttgtttagcggtgtttgttgtaattagatttgtatatcgagaaagaatttaaaagtttttgatgtttgttgaaataatttggtttaggatttacgtgtttagattttagagttgtgtggtatttgagtttttttcgagtttttattgtcgttcgaggaggatttttagatttgtgttttggaggtagagtaggttgtgggacgggtttttgggtgggaaggattatgtggatatgtttttttgtttgagagttttaatattttcgggacgtgggagttggcgcgttggtaggatttaggtgttttttttttttttagagaaaaaggtttcgttgtttggtaataggtgtagatttgtttttaattaatgttagtaggttttttgcgtgatgaattttgttttttagttaagatttaaggtattttgtgaatattgtttttttgtagtttgagtttttgtggtgggaggtaggagttatggggagtgggggtaggttttttatacgggttttatagttattggtagtattgatttgatgttttttgagtttagagtttagggttagatagatttattgtttcgattacgagttggtttatttagaggggggcggatatagtatttaggtagtagatgtattgtgattagttttgtagcggggttgtgggttttttgggttggatgttcgggaagaggtaggtggaggtaaacgttaggatatttttgtagtgattgggtgattgtaggttggaaatgttttttgtgggttgtggttgtttaggaaggttttgaatggggttagtggatagagtttgtatttagaggggtagtgttttggaggagtgaggggtatggtagtgtagggatgtttaggtcgtttttattttgttattggaaagttgggcggtttcggtttttttagttttttcgtttgtttttttgtttgtaaagtggggttagaaatagttttttttgagggttgttgggggattttgagatgtagtttatggcgttgagtacgggttttgttttttacgggtgtggtgggtgtcgcggttggtgtggtatttgggcgggaaaagggggtatttgtaaaggataggtaggtttggatgtttaaatatgtagatttggggatgggaggttttaggtaagggtttgtgtgatgttattgtatgaatgaggtcggatagtatggttattattaattatggaaagtacggtagatattagtgttagtagcgttcgtttgggggtttttttgagttcgataggtatttaggtttttagtgtagttatgggatttttttttttttgtttggttgatattttggaggttggcgttatgttggttgtaggttttttttattgggaggttgttttggttttttttgttattatttatttttatttttattttggagtgttatagatgggtggattatatgtttatttgtagggttaagcgttgataatgaggtgagtatttgttggatgatcggattatgaggatagcgggggcgttggtagtttgcgttcggttttgtaggttggtttttttttgaaaagcggttgtggtagagtgtgtattttagggagtggtgtttgttgttttgaatatttttatttagtaggtttttgtaagggtttagttaagtgtggtgtagagttgggttggtagttggaatagttttattttgtttagtggtgagattaagggttgatgggttaaggttgcgtgttgtttgtttagttcgtggatttatttattgagtatttttatatttttatattgggttcggggtgttaggaggtggaggggggattgggtgtttggaaaaataagtttatcgagagtttgagtttttaggggttagtattaggtagttattacggtgttcggtatatagtggttatttggtttcgtcggttgttttggtggtggagagcgtgtatggtggtcgtacgtgatgggtattatttagggtaatatagatatgtagattgtgtatttgtttgtaggagttagggattttttagtttggtaatttgtgatttttgtttattcgttgggagagaggtgttgttttttgatagtttggtgtcgggagagtagaattagggttttttttttttttttttattttttattttttatatgtttaggtattaggggaggttatatttagggatgagttttggttattgggtttagggttttattgttgttattttttttttttgttagttagttaaatgttcgtttattatcgtgtcggggatggggttggtttgtttttttgaagtttttttggtgtatagtttaggttggagtttcggacgatttcgttattttttttttcgattttttttttttattttgatttattttagaaatttagttaaaaattaagtttttgtgtttttttttgataaagttattgaggaaaaatggttaaatattgtttttttttttaaagtttttttggttttttttaaatttggaggttttgagttgtttatgagattaaagggttcggaattttttggaatatagttttagaagtgggaggatttgttatttttttagttaaatagatttattagttggtttttagatatttttaggcgtttggggtatttttgggtttaggttgtttaatttggtttgtagagtttcgaggtttcgtttagattgggttagtagatagttttagagattttaagtttgttgtcgtttttaaaagttttgttaatgtttagaaatttagagggataagaagatgatttcgatgttagtcgggattataaatagtgaggttcgtttttttttttatttatgtttgtttttattgttttcgtagttgggtttttaggggattgttcgtggttatgggggaggtcgggaatgcggggtttagattttattgggtttttcgtatttttttgtttttttttgtttattttttttttcggaaatttttgaatatttttttatagtttttggtattttgttatttttggtatttttgggttaattgggaaagttattatttgtttaatatttagaaaattaaggggtttggttttaaatatattgtagtgtttttttttttatatggtatcgaattttttgtgtttttaaagttaggagtttgtgttttggatgtgggcgatggagttttgtagatatttggagcggtttttttgggagagtttttttcgtttttttatttattcgtttttttttttttgttttaagttttggttatagtttcggaggggttatttgagtgtaggttgtttttaggtgtatagttggaggggggtagttattttatatttttttgtttgttaggggtatttttagggatttaggttttgagggatagcggaagggtggggtggggagtaggtcgttgtttcgtgttatttgggtgttatgtagattttgaatgggtagtttttgggagttggttttttttttttattttttttatagtgttgtttttttgaggggttggagttttttggagttttttgtagtttgtggtaggtttttttgattttgtgtttggtttcgtagtttttaatttatagttagtggtatgaagaatatttttggttgtttttatttgtggtttttgtaggtagtagttttttggggtagggtttgggggttttggtatttttttgtgggattttttgggtatgagggagggagttatttgggttatagatagattttttttttgtatttaggaggtttaggatggatttgttttatttttttttttggtgggaagagagtatttttggttatggggaatgtggtttggatagagttatttagtttttttttttttttaggtagggttttgaaagatggagatggttttgtttttgttaggttaatagttagtagtttggtggatttttatgtagtttaggtaggatttttttttgtttttattttttattttatgtgtaggaagttggttttaagtagggatttttggtttcgttttttacgtgggtgggtagtttttttgcgaggggtaggttaggtttttgttttatgttttttagagatcgatgttatttatagtaagagtatataagtttttttggttttaaattaggtttggaggggtggtttttttttttgttttttgttttttgttttttattaaaggttagggaatggagtgttttgtatgtttgttggggttgggtttttttttttggtttaaaatgaagggttggaatttttggtgtagattgtacggtgagaggtgttttttgggatttattcgaggagtattattgttgaatgttttgttaggttaggagtatcgttgggggtgggagaggtagttggtttatttgtttatttaatagttatttatgggtattttaagggttagttttgttttaggtattgggggtttaggtatgggtttaggagaaggggtagaacgggagggttttttggaggaaggttttttaattagagatcggggtaggagtttgttaggtaggtgatgttggttagttttttttgttattttttttttttttttttttttttttttttttttttttttttgagatagagtttcgtttttgttgtttaggttgtagtgtagtggcgtgatttcggtttattgtatttttcgttttttgggtttaagcgatttttttgttttagttttttgagtagttgagattttaggtacgtattattacgtttagttaattttttgtatttttagtagagataaggttttattttgttggttaggttggttttaaattttttattttaggtgattcgtttattttggttttttaaagtgttgggattataggtgtgagttattgcgttcggtttttttttgttatttttgtagatttatagtgtgtgtggaagattgtatgtttgtgtttggtatagttgttttcggtatttaggtgggaggtgggggagagggttgttggtgttagtataggttatggtatgagataggttttcgtagttaagcggggtgtatcgtagtattggaggggttttgttgcgtacgagatttaggttttgtatttgtttttttttttaggaggtttggagggttgggagggattagggtggtgaaataatttaggtgggagagaggtattgttggagaggtagagggagttgtaggtttgtagtagcgagttttaaattttgggtttttattagaaaattttagaaagggttgttttgtttttttttttaaattataaaagaaatttttggtcgtttgggttttttggggtcgggtgggggaggagattttttattcgtatttttgtaggtttagtattgtgtagagggaggagggtggaggtaaaggcgagggaggagggtggaagtaaaggcggggtttttttttagtttcgttgttttgtttggttgttgtttttagatttttatttttggttcggaaatatggaattttgggatagttggggtagggggtatagaacggagattttggtgagggaggaattttttttttagttttggttgtggttatagtaaggttaggttgggaggattttatttaaatatttatattttttttaatatttaaatgatgaagtaggtttttgtatatagttgttttggagttagttgttgtttgttttatttttttttttttttttttttttttttttttttttttttttttttttttttttttttttttttttttttttttttgtattttttgtttttgatttaagtttaggtttttttagttgttttttttttatttataggtattttttgtgattgagtttttttttgttattttttataattattttttttaattgagtattttttaggtgttaggttttgggttggtattttgtatataaggtgttttttaatttttacgagagtttaataaggtagattgggttgttgaggttttagcgttggaaggtcggttcgggtttttttagttcgtatttgtatttatttattatttttttattgtggagatttgttttttggtttttggttgagtacgatggaaatttttgtttattagtttttggagagtggggatggttgagggtttcgattttggggtttgacgggggttgtttttgttttattttagtttggttgtttttttatttaatgattgagtttgtaaaattagaataatagtgttatttggttggtattttgggtggttgggaggcgtgggagagggtgtacggaggggttgagcgaggtgttagtatcgtggggattttcgagggtagtttttttaggtttagggcggagtgtaggtagagggcgcgatggtttagcgtgtcggtttatatttggttttgtttttgtttatacggtaatgtgggggagttattagttttttagtgttttagttttttatttgtgtaatggggataagagtaaattattgtttttaggtatggtaagtatttatatatattgattattgtagaatgaatatagtgagttttttttaggtttttattatatgttaggtagggtgttaggttttagtggagaggggataatgatgggtaagttggtttttgtttttaagggttgtcgagtagggaggaaggcggcggttgttttgattgtgattcggagtggggtgattcgtaaagaggttggcgggaggttggttgggggttggttgggggttgtttttttttttgtttgtgtttcgtggtagggtattaaattggttttttttatggattttcgaggttttgattgtgggatttcgggtaggttttgggattttgtgattttgttttcgtttgttatttaggtttttgtttttagtagtgtttagtatacggcgatttttgtatgttttttagtgtgtgattgattttggagttgagatttggtagttgaggttggatattgtttttggataattttcggggaggtgggggtagggtggggttgtgagttggtaatttcgagtttttagtagttttcgaatggaggttttttttttgtaggattttcggggaggaaggaggggatgggggagatgaggtttgtgagtttttaggagggtagaggtttatatttgtagcgttttagaaatatttcggggtgtttaggtttatttagtttttttgagttagaattattaagagttggggattagtagtttattttttagtaagatttagaaatgatttttttgaatagttcgagttaagaatgatatatttggaattagaatattagaattatagaggaatcgagagaacgggtttaaaatgtgtagggattttagttatatggcgttatatggaggaaagtatttaatattattattgtatgaatttgtttaaatatatatatatatatatatatatatatatatatatatatatatattttttagtaaagagtggaaagatatttgttagaatattgatggaagttatttgggttgtgggtttatagattttttttttttgtttttgtgtattttgtaaattttcggttttgtgtttaaattttttttatagttaggaataaagtaatagatgttattttttaaagtttatgggttcgtgttcgtaattttaatattttgggaggttgaggtaggaggattttttaagtttaggagtttgagattagtttgggtaatatagggagatttttatttttttttttttttttttttgatagagttttattgtgttttaggttgaagtggcggtggtacgtttttggtttattgtaatttttgttttttaggtttaggtgatttttatgttttagttttttgagtagttggattatagatatttatatttgtaggatttgagaattttataagaggaaagtttttattcggaggttgttggggatttggagttgttagtttatatattttttagtagagatagggttttattatgttgattaggttggttttaaatttttgtttttaagtgatttatttatttcggttttttaaggttttaggattataggcgtgagttattgcgttcggttatgggagatttttttttaaaataagaataaaaataaaaataaataaaagtttattgttaaaaagaaaaatatattatttaatttaatttttttttaggattgagagatgaggaagtagaggtcggaaagtgttatattttttggtcgttggtagttaggggatttgaggtttgggttggttttttcgtgttttaggtttggggtgttaggtggagtttttgttttgtttaaaggtttaggtgtttttgttagtattgtttgtttttgtatttttggttataaggaatgtgggttaaaggtagggtttttgatttttgtttaggagggtgaagtgggttggttttttttgtttttgttttaaggtttttgcggttgtgtttttggaaattgttggttcgagttagtgtgcggagttgggatagattttatcgtggttttcgtggggttattttatgttcgggttggaagggatttttcggtttagttttttttgttttttattaggaaattgagattagagaggttatttgtttggttcggggtggggtgtagatggcgtttgtgatttttgtatgttacgtgtagatagttttttagttgtgggttttttacgtaagtagttatgttggggataatttggttgaaatttgcgatttaatgaagagaagaatgattttttttgtagttttgtgttttataggtttttttttgtttttattttttttgtagaggggttttatgttggtgggtgggtttttgttgttgtaatgggtttaggtagtttttgggtagtggaggtttggttgtttttttgtttaatgttttttgtagtttacgttgttcgggaagggcggggaagtatttagttattggggattttataagatgggtatttgggagatgttgattggtaggttaggttttcgtggtttataggtaggttagaggttatagtgttgagttgggttgagttggtagtttagggtagtgggggtgggggtattttgtttagttatgggtttttttggtataagggtttggagtttattgtaaataatttttttagttttttttttttttataggttattagtagaattgaggggttttttgttgatgaggtgtggtttgggaggggttagttgtttgtttatttgatttttgcggataggtgattataggttttttgttttagggggttgggggaaagatcggggaggtttttttggtttttttatttggaaggaaaatacgggtataggggagatattttatagggatatattttagttagtattttttggttgtgttgggggtatagtgtttgttttgtttataagaggggttagttttttttaggatttaattttagtttttagtgtagggtagatgagtatttagaggtttagaggatttatattacgagagagaagttgtgattatataggtattgaaggttaagtagaagagtgggatatacgggtgatttgaaagttttagggttagtgtggttagttttagatagttggggagttttgggtattaggtttagtaggggaggagggttttcgtgatagtttgttggggttgttgtaataaagttttacgaattttgggggttgaagatggttttagaggttagaagtttaaaattaaggtgtcgattaggttgattttttggggtttttgcgggaggtttcggtttaggttttttttttagtttttggtggttttcgggtgtttttgggtatgtagatgcgttacgttattttttgtttcgtttttatatggttttttttttgtgtttttgtgtttcgtaaggatgtttgttattgtatttagagtttattttaaatttaggatattttttttttgagattttttattgtatttgtaaagattttattttaatttttgttatatttataggttcgagggttagggttttggtatgttttttgggggttattatttagtttattgcggtagttgattttaggggaagtagaatgttttaagtttggggtgagcggagggaacgttgttgggtggggagtgggagattaggttcggagatatcgcggattttttttgtttgatgagggcgtgatgaggtttttattttaggttttttgaatggcggttgtttttgaggagatttttttttttggatttgtttttttagaaatttttatttaggtttaggttttaaggtggatggtaagaggcggttgtttttgttatatttgatgggtgagtgtgtgaacggggttgggagtaggatatttgttatttttgtggatagattttagaggtttatgaatttgttgttggggaaggtgtttgatttagtttgattttttatttttattttttttttttcgtttttttttattagttttgtttttagagttttatttttttaaaggtaggcgtcgttttttggattttttagtagttattttttattttagattttttttttgtaggtttttttggttttagcgtttatttttttttgggtttttgtttttttatcgtgaggtttttgggtagaagtgtggggttttttcgttgtgtttggttttcgcggtatattaggggtttttttaggggttcgttttgttcgttaggtttttagggagttttttaagtttttagatgggtttgatggagttttttaatgcgttgttttagagtaggaggggtttcggttgagttcgagagtttttttagttatattttgggttgtttggggtagttaggtagttcgttttttggaggtgttgtttttttttggttattttttttggaattttttgcgtttagttgcggttttttttatatagtatatttattatttttttttatttgtgatttttttttgttaatttttttatgtttttgagaatggagattaggttttttttattttggagtttagtagaatttaaattaggtagattcgtgtaggtttacgtgggggttttgtggttattgtggttttgtcgttatttttagtttagtttggcgcgttttggattatgttatttagtgtcggttttttaaattttttttttggttttgtaggtttgggaagtagttggtttttgggtgtagttgtgatcggagtttgaattttgttttttggggttatcgttttttgtaattaggttgtagtttatattggttcgggtagaggttatcggttgttcgttttggggttataatatagagagtttcgtgattaatggaggttttatttgggttaagtggtttttggtgttaggcgtttttttttttttttttttttttttgtattttttaagtgtttgtaatattttttttaatggataatgagacgaggagggagggaggggtggtttttttgtttaggtagattaggaatggttatcgtttgtgtgtgtagtgataggtttgggaatagataagggagagtttgttcgggaggttggatttttatatcgatgttgtttgtgtttggtagttttgtttcgggttttagaatagatattgattaatacgttttttagggtttttaggttcgggttttggttttcggtagagttttttatttatgggaagaagtatcgagtagttttgttggtttttcgtagggagttgggatgtatttttaagagtagtatgcgtgaagttcggggtttgggtaaaggagtgtttggggaagagtttgttgttgttggagggtcggaagtagaggggaaggaggggtacgcggtaggttgaggaggtggttggcgattttgtggtggggacgagggggttatgagtagattaggagttagtattacgtttttttgtttttagaatcgaggacggagagttgttagagaggttttggcggggtgtttggggttatttaaagggcgtgggtggattaaagttgaggaaagttttattttgggggatttcgtatttaatttttgaggtttttagagttgtagtttgtggtttttcgaagttaattattttttagggtttcgtttttgtttttagcgatagttatttattagggagtttttgatttaaggagatttgaaaggttatttggttttttttttatttttaggtaggttatatttagatttttttatatagattcgttttatttttttgttgttttttattagggacggagggtgggcggtttttttatttaggttttggcggttttattttagttaggaaattttttttttttatttgttttatatttttttttttgcggttttcgtttatttttttttaatttgtttttagtggagtagttagtagttggtttagaattcgggggtggggggagcgttagattagtgtagtatatttgagagtgtgttagaggtgtttttatttttatagttgatttagtaaagaaaagaggaagtttagtaatttagcgttattttaaagttcgtttggaatgattttgtggttgtcggaattaggggtacgcggtagatgacgggagtaggtatagagaggttttcgtttcggattagtcgttgttgtttttttggaggttgggttgttttttaagaagaggatttaaggttttgtgagcggtggttttttttggagtttttattgtggttttggttttgttttgcgtaaagagagatggtttgaagtagaagttgttacgtggttgttttaggtaggcgttcgtagttttagttattcgggaggcggaggtaggagaatggtatgaattcgggaggcggagtttgtagtgagtagagatggtattattgtatcgtagtttgggcgatagagtaagatttcgttttaaaaaaaaaaaaaaaaaaaaggagtagagaaattttttttagaaggtttgtagttattttttttttatgttttagaggtaaaaaaaaaaaaaattgtatatttcgttttttttttttttttttgagacggagtttcgttttgtcgtttaggttggagtgtagtggcgcgatttcggttcgttgtaagtttcgtttttcgggtttacgttatttttttgttttagtttttcgagtagttgggattataggcgttcgttattacgttcggttaattttttgtgtttttagtagagacggggttttattgtgttagttaggatggtttcgattttttgatttcgtgatttgttcgtttttgttttttaaagtgttgggattataggcgtgagtcgtcgcgttcggttatacgtttttgtttttgaataggtggttttttgattttgggtgtggttattttaagattttgttttggtggggtataattttggttttaggtagggcgatcgtataatttattgttttttgggggatacgttagtgaaagggatttttgaatgattacggtgggataatagatgtgagttgggtttgttttaggaaggttggatgtatgggttttttgagttagaggagataatagtagaaagttttgcggttgatgggatcgagtaggagaagggtcggcggaggttggggtaataacgtatttgtttattgtgaagggtttgtgtgagttgatggttgatgagagggtagtggggcgaggttgttttttgttaggttagattagttttaggatatttatattttttttttagaatcggtgatttagtggttagaaggggttttagaattgacgggatattgagggagtcgaatggaatggttggagtggttatagtaggttttaggttttttttcgttttttttttgtgttttgtttttggggtttatattttggggttgttgtaatagagtgttataatttgggggtttataaatatagttttcggcggtttttggagatttttggcgttttttggtttgtagacgtattattattatttttgatttttggtttttgtttttacgtggttttttttttttgtttgtgtgtttttttttttttttgttttttataaagatgtttattattggatttagggtttattaaatttagaatgattttattttgagatttttattttaattatatttgtaaagattcgttttttaaatgtgattatgttcgtaggttttaggagttaggatttaagatatatcgttttgggggatattgttgaatttattatatttaataaatttagagttggtgttaatgttttttgcggatattatagtagattttggaggttttttgtaaaggaattcgtaggatttttttttttttttggagggatgagattgtagttgggttggggaaagttgttggtttaagttggggttggtttagttggtgttggtttgttaggttgttagagagttttatttagggagaaattaatattataaagttgggggataagagaaggtttggaattttaagggttggttgttgaggttagttgtttatttttttgtgttttattttatagggatttaggtttgttagtgtttcgtttttggaaggaatgttgtgggttgttgtgttttataggtagggtggagggtttttttgtagttagcgagttgttttttttgtagcgtgtagagggaaggaggaggtttgtttattttttttggttttagtcgaaaatttaattataggttttggtattaggtagatttgtttatttttatattattattgtagagtgagttaggttttttgggtggggttgtgatgagtaggaaggattttcggagtgtttgggattttttgggtttagggttgttagaggtagagagaaagaagtttttttttaatatttgagtaaagatagttattagaatttattagagtggttttttgtggtttttttttgggtgttgatttttttggtgtatttgaagtttttagggatattattgacgttttttgtatttttatttaggggttagtggaaatggttttttttttttttgtttagaggtattgtggatgatgattttaggttttagattttagttattgggttacgtgtgtagataagtttgggtagttagtaatttttggttattaagttggttttttgcggattgggtcggtattggaggcgggttttagttgttagtattgtggtttagttaggtttggttttgggaaggtagagggggaggggattgggaaagggattgagttgggggtggggtggtattttggttttttttttttagatttttggtaggtttgaattatttggttgcggttttttaaggagggagcgtttttttcgttttgatgtggattttgttttttgtttacgttgtttttgtttttaaataaatgtggttttttgtggggagtttgggggtcgttttttattgatattgttgttttttggtttttttttgtaggtttcgtttagttttattgcgtttatttttaagtttttttttttggacggttttgttttttgagaatatatttttttttattattttaattgtgtttttttttttattcggagtttgttttatttgttttaggagttattttttttttttattaagtagtttaggttaattttggagggttaatttgtgtttttttagaagtaggttttgagatagggattttagtgggaggggatattaggggatgtttgagtgtgggaatgggttaggtagggaatttagttaataaagggtgttttattagtttattgtgattataggtggttgtttagtttttatatcgggtagtatggggagattgtagatcgtgtttttagttttgttttatttggggttgggtaagggagttggggtttttatattttagtttttggttaaggattgtattgtttattttttttagtttttcgagggtttgggtattaggaaaggttttgggtggagatacggaaataggttatgtgaagttagtgggcgtgattggtagtagtaaggttaggatagttttggttattagtaaggtgattatatattttagtatgtatagtttttatagatatatatttaggagatggtaattatattagtaatagttatttttgtcgcgtgttatgtttgtatttagggaattttattttttatttatttatttatttttatttgagatggagttgcgtttttgttgtttaggatagagtgtaatggtataatttcggtttattataattttcgttttttgggtttaagttattttgttttagtttttcgagtagttgggattataggtatgtattattacgtttgattatttttgtatttttagtagagatggggtttttttattttggttaggttggtttcgaatttttgattttaggtgatttatttattttagttttttaaagtgttaggattataggtatgagttatcgcgtttggttttaggggtattttattattttattattttttatagtaggtgatattgaggatattgaggtttagagtagattgtggttatgttatttttttgtttggtttttttgtttttagttttgaaataaagagtacggtttttgtgtaggtttatacgttttgtttttagttttggagtagtttttaagttttttgaaggtatattaggtttttgggtttcgttttttaagttttggataaataggaggtgaaggagtttttgtaattggattttattttgttagcgttaaggttttgtttgattatttattttattttatatagattagggatttgtgttaaggtttagtgttataggagagtgaagataaggaggtgtttatggcgtatatgttgttggatttattttgtagattttaagggttatggggagttatttgttaggtgaggttttttcgtggtttttttttgtaggtttagggtagtatatagggaggtgtttttttattttttggtattatttgttcggtttttttgagttttgattttggtttttagatagttagtgtttttttagggatagaatttgttttgttgttgtttagaggagatttagtttgattagggttagcgtttttggaatttgagtttggaattttattttgttttgggtagaggttacgttgtttttttttacgagagttgagttgcgtatgagattattttgattttgggttttattatttttttgtatgatatttgttttaggttggagtagggttttgtggttcgtttggtgttttttttttagattgaggtttgatatgtatattaggaagtgtttgatttggttttaggagttgggagcggtttgttaggtagtttgtggttagagtaggggttttaataatggttttttgtgcggtatatttttttttaaataggtttaggtttaggttgtttttgtttcgatttcgttatgggtttggaggggaaagtttgtatttggagggtggtttattgtggtttttttttgtgtagtagttgagatcgtaggtgtttgagaataggagaagttttgtgtttattttgggttgtgagatgtttttttagaggtggggatggggatgggttagtatgtagttatttatattttttagtttgttggtattaaggtttgtgtatgtgtgtgtttttttttttttaattttgtttttttaatatggagttttgttatttgtttaggttggtttcggatttttggtttaagcgattttttagttttaggtttttaaagtgttgggattataggtgtgagttattatgtttagttagtattaaggtgtgttttttaagagtaatattggtcgggtgtagtggtttacgtttgtaatcgtagtattttgggaggtcgaggtaggcggattatgaggttagtagattgagattattttggttaatacggtgaaatcgtgtttttattaaaaatataaaaaaattagttagacgtggtggtcgggtatttgtagttttagttattcgggaggttgaggtaggagaatggcgtgaatttgggaggtggagtttgcggtgagtcgagattgcgttattgtattttagtttgggcgatagagcgagattgttttaaaaaaaaaaaaaaaaaagaataatatcgatggttttattttttgaatatgttaagtgatttttatgtagtataagtattttagaaggtaggaaaatgtaatgaataatatttatcgttatttattttatttagagatcgttattttttgttcgggtgtgagtgtgtgtgtgcgtgtaaattgtatatgtgtgtatgaaatggaattaggatttttgtatatattttgtgttttgttatttttatttaatattttcggtattttttatttttaaaaatgtgattttaatgatggtgtaggtttttgatatatgggtttagaaaatttgcggaaattcggattgtttttaggttttgttagtttaatgttgatgtaaatgttttcgtacgtaaatttttttgtatttttgattatttttttgggataaatttttagaagtgggttaaagtatatgaacggtttttaggtttttggagtaagttgagatcggtggggattggagaagggatttagggaggtttttgggagtttgcgagattggagtttggttttaggggatttgaatttatagatgaaggagatggttggtaaaggtgggaattttttgttttatgggtgggggggtgatattgttttattttttagtgatagtatggggatttttttaatatgatttggtttcgtatttttttgatattgtgtacggtttatagttgtgatgtttagttgggagttttttttgtgttttttagttgtattaattttttgtagatagaggaggaagttgttcggtgtttttttttgttgcgtgggttttttgaatttgtttagttgggtttgtggatttgtgtagttacgtacggggttttaaaatttgtaaaatgataagtttacgaatattttcgtttttgtgggtgaatgtggatattttttggttgcgtttttttttatagggaagatggagacgtgtaaagtgataaggatttgttatttttgggtaggttatgtcggttttattgtgaggatggtggtagggggttttttaggaggtttgtatattgggaagagaggggcgatcgtgtgtgattgtaggatttagggcgtagttttaggattttgatgggggaggagatgttggggagttttgttttgttagtttggtgatagatattttttaatgtttttcggttgggtataatttataatgtttttcgtggggaggtaattgtttatgaggtatttttggtagggatgattttgttttattgttatatattttagtaatgaaataagaatttagagtgatgtgattttttcgatgatttttttaattatttggggtttttgtgcgattttaagaagggggaaggaggtagttttcgtttttttgggtttttgatgtggtagttttggaatggttacgtgttcgttggtttatagtgggttatttgtcgaatgtggttgtggtgggattggggttgggttggagagtgggtgattatattagttagttttattttgggttattgtgtagttaggggttttatttttttaggggtttcgttgtgagtgttttggggttgttggaataaattattggaaattaagtggtttaataaagattgattcgtttatggttttggaggttataagtttgatattaaggtattggtaggattatatttttttcgatagttcgaggggaggatttttttttgttttttttagtttgcgttggtttaggcgttttttggttttggtagtatttgtagtttttgtttttattacgtagttttttttatcgtgtttttttgtgttttaagtttttttttgttttttttttataaggatatcgagtattggatttagagtttattttaaatttaggatagttttatttcgggatttttaattatatttgtaaagattttttttttaaataaggttatattcgtgggtttttggggttaggtattagatatgtttttttgggggttattagttaattttttatagaattttagacgaaagtgaatttttataggttgaaatgggggtgaaggtttagtgcgttttttttttttgggagtttttttagggtttgtgtttattttgtgattttgtgatttagttttttttttgagatgaagttttgttttgtcgtttaggttggagtattgtggtacgatttgggtttattgtaatttttgtttttcgaatttaagtgatttttttgttttagttttttaagtagttgggattataggcgtttatttttatgtttagttaattttttgtgtttttagtagagatagggttttattatgttggttaggttggtttcgaatttttgattttaggtgattcgtttgttttgggtttgttttggttttttaaagtgttgggattataggtatgagttattacgtttggtatttagtaggttttggttgttttttttttttgagatagagttttattttgttatttaggttggagtgtagtggtgtgattatggtttattgtagttttgattttttggttttaagtgatttttttattttagtttttcgagtagttgggattataggtatatgttattatttttggttaatttttgtattgtttagtggagtcggggttttgttatgttgtttaggtttgttttgaatttttgggtttaagcgatttgtttattttggttttttaaagtgttggggttataggcgtgagttattacgtttggtttagtaggttttttagaagcgtttgaggtttggtgaaggtatggtgttatggagtagagaatatttaattttgttttcggggagtcggaatatatttttcgtagttaattttaatagttatgacgtggttaggatgatatggggagggggtggtgtggattgtgtgggaggttagtttttcgggaagggggttggagtgggtttggttttgaggaggatttttaagaggaggaggaggcggtggtatgttcgtttggggggatggcgtgagttagggtgggtatttttttatttaggtgttatttttttgatattttagtcgggatatggtttttttggggaagatggatatttttagagtggggtattttttggggaagatggatattttcggaatggggcgttttttgtttttattgtttttttagtatatagttgtatttttttgtagttttggaggttgtgagattttttggttgttatttagaataaattcgtttttgagtagcgtcgttttgatggtggggtggtttttgcgggtggaatagtttttgttgttttagagtttattgagagttagtgggtatgggagtggtgttggatcgaaatatttagagggattatagagttaggtagtaagtatagaggttagttagtggggagggagggatttatttatgaaaagatattaagtattgaaagagaggagaggatggttggggatcggtatatatgtgtattttgcgtagatggttaaggtggtgaggcgttagttacgtagataattggaggaaggaggagtgttttaggggaggggttagtttcggttttagaatgattcgtttgtgtacgtgggtttggttggaataaattattgtattcgtatcgtagatttaatcgtaagtttatattagggtagtttttgttttggtgtagtgttttcgattatgagttggttatggtgggggtgattttaaggggatttttaaggagggggtttatcggattttttagggaaggttatttgtttttttgggttggatttgggataaggtttttttttgtttagtttttgttttttaatttgatcgtacggaaggatgttgaggatatttggaagtcggtttttgttttatagtatttataggatagaggtatattatgtggggatagtttggatagtgtttaggaggtagggagtagattagaggatcgcgggaggttttgggaatcgtacgaggatttaggtattgagttttgtattttttggtattagttcgatgtatagtttggttttgtgtttatttcgtattttattttttttatttgtacgggggcggtaataatattttttatagtttaggtttaagcgggtgtagatgtgatgagtttggtaagtttattttattatatttagttttgggtattgaattttggattttttggttggtagaagtggatatttaatttttttttggggttttggggtttttgtagaattagaatatagttagtagtttgtatgtagggtgtagagggatagagggatattatgtcgggagtttatatttggtatatttttgattttggggtttagtgttttgttgttttgcggttacgtgattagttagaggttatggttggatttataggcgaatatagtttgtggatttgattttgtttggttttgcggtgttttattttatttttagttttagtttgtggagatagagtttcgttttgttagttaggttgagtgtagtgatacgattttagttttgtaatttttgtttttcgggtttaagcgatttttttgttttagttttttgagtagttgggattataggcgagtgttattatgtttagttaattttttatttttagtaaagatggggttttattatattagttaggttgtttagtgttttaaaaagggtttgttttgttttgtgttagtatttaaagattaggagatattatataaagatttagatttttatttttttgagaagtgaatagttttggttacgtcgggtttatattttttagggtagtgacggagttgagatagggtttgtgataattgagagttttttggagtttatacggttttttgtttagtttttggtggaggttgagtttagtgatttaggatttcgtttgtgtttattaagaaggagaggtgtttgtggtttagagagggcgtttataggagtgttttgtttaggaagttggtagttgaggcggttagggttagggggttgggttttttttttttttttttagtgtttgagtgtatttggaggaagagagacgggtgaggggaaggtattgaaattggttttggagcgttattattgggggttggggattagttgttatttttttttttgtgggtaggggaggtagtggtgggattttatgagattcggattttgtggtttggtgaggtagggagcggttggggagatattgtgggtttttataggggtgcgttgtgggtttggtttggggaaggagttggtgaatgtgtttgttatgtgggtttttttttgttttggttttgataattaggagcggttggtttttatttggagtgcggttgtggggattgtggaggtggtagttttttaggtattatttttattgttttcgagggagtagattttggtggagaggtaggatggttgtagggcgggagttggtggttggtattattgtacgggtttgtagtagtggatgggaagatgtaggagaggttgatgattgagaaagttggtttttgtggattaagttgggggagtcggataattaagtggttagaattttgggttttggtattagtttgatgtatagtttggttttgtgtttatttcgtgttttattttttttatttgtattgggggtattggtattttttatattttagggttaagcggttgtagatgtgatgagttcggtaggttcggcgtttcgtcggtattgaaagttttagtgttcgtttttagtgttattgatggggttttgtttttgttgcggttttgattggttatagttgcggttatttattattggaggtatgtttttcgttgtggttgatggtagaggtgtgtttgttggtggtgttttagtgtgtgttttggttggaggtgaggagggataaaaatagtcgcgataagaaggaaattaaggtcgggtacggtggcgtacgtttgtaattttagtattttgggaggtcgaggcgggtggatcgtttgaggttaggagttcgagattagattgattaatatggtgaaattttatttttattaaaaatataaaaattagttaggtatggtggttcgtgtttataattttagttattggggaggttgaggtaggagaatcgtttgaattcgggaggtgtcgttgtattttagttagggtaatagagtaagattttattttaaaaaaaaaaagaaggaaataaaagttttttttggaattagaacgtttttatgtagacgtagttggagggggaggttgtgtggtttgcgtcgtggttatggtaagatacgacgggtagtatttttttattttagtttgtatttttgttttagaatttatgatggtttttttaggatggggttgtttttttcgtttgttgagatatgaaggacgggaagagattttcggtttttatcgtcgtatcgtttgtttttttttgttgttttttagtaggaaatatgtcggagtgttttttagttatttatttattaattgtattttttttttttattttttagttttgaaaagattttttgaggtcgaggaggtcgagatatttaattttattttatttcggagggtttagatttttttatttcgagttattgtggttagttttatttagaaattttaggatttgggcgtgaagaatttagaattttcggttcgttatgtggattttttaagttaacgtttttttaaggcgtttttgcggagggtggagttttcgggttttaaggcggtcgagtcggtgtttcggcgtattgagttgtttattgatatttcgtttaagtaggtggagaacgtcggggttatcggttcgtttcggttcgggtttaagagggtcgaggtgttgggttataagacgttagaatcggtttttcggaggacggagattattatcgttaaattttaggagttagtttatcggaggatggagttttttgtttttaaggttttcgaggtgtttattgtttttgttatcgacgtagtttttaagagggtggagatttagatgtttaagtttgttgaggcgtttatcgtttttagtttagtttagattttggagaatttagagtttgtttttgtgttttagttgtagagtaggttggagtttaagttttagttttttgtggttgaggttatatttcggagttaggagggtgagtcgtagagcgttaggttttggatgttgtggtaatggggggtttggttgttggttttgttatagaattttggaggaagaagttggatatggggtggagggtgttattttggagatttagaaagatcggaatgtatgggggtgggggtttgtaagtttaggagaggtggttttttttgtttgatgggaatatgttaagatgttttaagcgggatttgaatgagagtttggaaagattttttgggttttaaggagttttttttatgggttatcgtgggttttgttgggatttttgtttgttgtgtgtttttggagggtttgggaggtttagagaatgaggagttacgtaggaattagggtaggtttatgtaggggtgtaggatagggtggagttgagatttttagaagggttgttatattttggtggtttttgtttgaggaattgtaggttgtttggatatgtttagtagaggtcgagggtttggggaagggaggagggacgtatgttttttgaggtttgtattggagtttatggtttggttttttttttttaggagggatggttgtggtagagggaggggaatatgaggagtattttagtttgtaggataaaatttttagggtattgggaaggggtgtttggattagggggttgtgtgatagttgtatacggttttatttgggggtgtttttttggcgagaggagagaggttatggggttttagtagcgttttgggagggtttaagtttatagtcgtgttgatatggagtttataggtaggggattggtgttagttttgtgggatatagggtttgtttggaaatgttaggttgtgggatatggttgggtttttttttagaagcgtgttttttggttttagtagggatcgtggttttatggggttatagtaaggtgttagttgggttagaagttttttaagagttaggtttgattttgggtataggattagaatttagtaatgtttagtaagttttttttaggttggataaatagtatagtttgggtttttgatttagttgttgttttttatttttaatcgtggtgaaatatataatatataatgtgtaattttagttattttgtagtgtacgttttagcggtatttagtatatttacggtgttgcgtagttgttatcgttgtttattttcggtattttttttatttttttaaattgagtttcgttttcgttagattaagttttttatgttttttttttagttgttggtagttattattttattttttgtttttattatgaatttatttgattattttaggaattttgtgtgtgtggaaaaatataataattgtttattttgtgtttggtttattttatttagtatgacgttttaaaggtttattcgtcgtgttgtagtatggggtagaatttttttttttttagaggttgaataatattttgttgtgcgatgtatttgtgttgtgtagttgtttttttatcggtggatttttgggttgtttttatatttttttaagtttttttttttattttttttgatttttttttgatttttttgagatagggttttgttttgttttttaggttggcgtgtagtggtgtgattattgtttattgtaatttttgttttttgggtttaagtgattttttagttttagttttttaagtatttaggattataggttgcgcgttattatgtttggttaatttttaaattttttttgtagagataggtttttattaggttgtttaggttggttttaaatttttgggtttaaatgagttttttgtttcggttttttaaagtgttgggattataggtatgagttatttaatttttttttggtttttttttttgaatgagagttttttagtggttagtgggtttgggggttgggaggatgtggggtttggagagggtgtgggtttggggggagattagtgttttttatgtttttatgggtatgtggagtgtatatttgttttggcgggtttggggtttgggattttgtattttttatagagggggtatcggaatatattgagtagttagaggttagtgggttttggaaggtttttttcggtttttagtgtgcgagtttcgtgtttttttttttatttttttaagtttgattttgaagagttattttgttttagttatttagatttagtgatagtggttgttggtggtatggtgttaggttaaaggtatgggtagtttgtagagtggtaggaggttgtttttttttttgttttttgttggtgtaggatttttgtttgacgtgtcggatatatttttattttgggttgatgtgtttatatttagttgagttaaataggatgtggttggggaggcggttgttatcgagttatttaaatttcggtgatggttggtgttggatgtatagggacgtggttttggttttgggggataggtagggggatgtttatggggatgtataagaatatttttttttaggggtagatatagtttagtttttaaattgtgttagagattgtgtcgggagttaggtttagggatataatttgcgggttttgttttttggagtttatcgagtcgtgagtaggatggttgggatataaggagtgtttagggagtttttttagtagtggaagtataattttattaggttaggaaggggagagaaaggtaggttacgtggaggtagtagcgtttagagttgttaggaatttggcgttttggggggacggtggttttttttatggaataggatgtatacgttggagtcggggtatgggagaaaattattagtattttagattcggttatttacggatagggatttgtgtaggtgggagtttagtttacgtggagaggttcgtgggttgggttgatagttttgagggtttaagtaagtttaggtggaggaaatgtagggatagacgagggtagggtttttttaatggaggagtgtttttgaaattcgatgggagtggtttttcggggggtttaggtttgagttttattagtttttttttcgaggtattatttgtttgttttttcgttttttttttttgtgttacgatcgttttggatacggatttagttttttttaatttagttttttgtttattttttttttaggtttatttttttttgtttttttatgtggggttgggttgggagttttttgagtttcgatatgtatagttttgattaatttttgcggtttttttgtttttcgagtattagggatttagttggtattatggggaaaggaattatggagggagtttcgtgttttttgagtagacgtttagttttttggtttttgtttgcgggagggtatttgtgttgtggtttgtttttattttagagttgtgggtgtagggtagggttttttggggttttagttgaattgtttttagattgatttttttaaagtatagtattgttgagattttttttcgtgttgagttttttttgtttatttattataggtttttttacggttgatttatttttttgtttagtttatattttttttttttttagttttttttgttttggtttttttttggttttttatatttttttttataatttttttgttttgattttttgaattttgatttttgtttttttttatattattgttttggtgaatttttatgtattttttaaaatttggtttaaatatttcgtgtttggtttgggatataaatgatttgtgtataaatttttttttttttgttagatttttttttttaaatgtgaaagtagttttttagattataaaaagtaatcgagtattttttttttaaaatgtaggaagtatagaaatgagaaagaatttaaaatttatttgtaagttagcgatatttatgtttgaggttttgttgtatagtttttaaaattttttttatgtttttattagattttgagggtagggttgttgtttttgtttttttttgtgttttttttttgttttttgttttttgagatggagtttttttttattatttaggttggagtgtagtggtatgattttagtttattgtaatttttgttttttaggtttaagcgatttttttgttttagtttttcgagtagttgggattataggcgtgggttattacgtttggttaatttttgtatttttagtagagacggggttttattatataggttaggttggtttcgaatttttgatttcgtgatttatttattttagtttttttgattttttaaagtgttgggattatgttatcgtgtttagtttgttttggtttttataaagaattttataaggggttaggtgtagtggtttatgtttgtaaatttagtattttggaggtcgaagtaggtagattgtttgagtttaggagtttgggattagtttgggtaatatagagaaattttatttttataaaaaatataaaaaattagttaggtatgatagtatgcgtttgtagttttagttattggggaggttgaggtgggaggattatttaagtatgggaggttgaggttgcggtgagttgagattgtgttattgtattttagtttaggagatagagtgagattttgttttaaaaaaaaaaaaaaaaaaaaaaaaaattttataagatattaagtaagtgatttggatataataggtgtgttatgaaattatgttgaaggagtgagttattggtggtgagttgggatggtttttttgtggtttttgtaggtagatgtagtgatttttatgggtcgtttttagagattaagtagaaatttttttggttaattttatttttaggatatttggttttttttttggaggttgtgttggagggtttagtgggtgggtgttggttttagtgtgggggttttggaaggagttagtattttaggagggagtgtgggtatttagatggttgaaggggagggagaggaagagaggcgttgtagagggtagaggtatttttgtttgttttttcgttttagggtttggtgaggtttgagttttatgttggtggggtggattttcggttttcgaggttttggttttgtttttggatttggtattttttttgttgtttttttatagaagggcgtttattttttggggttatttttggtttttttaggttttgggtggggacggttttgtttttttttttggatttttgttttttttttgttttttaatatgggtgtttttgggtggagtggggtggggttgggttgtagtatttagtattgagtttgtaagggttggttgttggtttagagttttttttattagagttattttttttcggttttttagttatattagttaagtttttttagagttgttttataaggcgggtgtttagcgttcgtttatgggtttggttttttgtttttttgggatgtttattgggggtaagagggaggttaggtttagtgtttagtttagttttgggtatgttttagttttgttttatgagttaattggttttgaattattattttattttttttagttttaattttttgatttgttaaagaggtatttgtagaggtggttgggggttgagtttttatgtatttatttattttaagaattaagaagggagtttatagtggttttggggttatttgtgaatatggatgtgaaattggggcggggtagatatggtagtatgttttagtagtttttttgtgatttagagggtttggaaatttttgttatgtgggtggagcgttgagggagtagggggttaggttttttcgagttgatgatggtgggcgtggtttttcgtatatttggttcgtatcgggtcgtgtgttttaggggtagaatagggaggaattttagtatagatagtagggttgttagtatagcgttgagtatagggttaattaaagtatagggttttttggaattatttaatatagagtagtgaagaggtggttttggggaaagtggggttagagttgagtttgagtggggggtggggagggcgggtattagtttgtaagggagggatatttattgggttttagaagtttttggtggggattagggattgtgaagttggggagagggtgattattgtgatttagggaggaagggttttatagatagtttagtttttggtttcgtgtttataggatattttatataggttttgagtttatttttggattgtggattttttgaggtagggtgtgtaggttcgtttagtattaggtgtaaggtagggggttttggtaagcgtcgagggatttattggtgtttgatgaagtagtgagtttggatcgtgttatgtttcgggttttgagtttgtaggatttttttgtggggttgtgtgtttttgtttttggaggtgtttagaaggtattgacgtttttgtcgggatgttttattcggaaggtttcgttgtttttatttttttttatttttttgagttgtttgtagagggtatttaggtttttttttattttgggattgggtttttttttttttttttttttaagaataagtatttttttttttcgaattgtttttggagttttttagatttaggtttagagtgggaagtttcgtatgtgttgggggaataggaattaatgcgggaggattggttaggttcggtgtgtttttttcgtggtgggacggggtggggttagagaatagagtttggttttagagtttaggaagagaattttttttttcgtcggtttgttaagtatcgtgtagtggtgagaggaaaggagggttggttcgggaatgtagcgggtgtcgagtagttgtggaatattttaaatagagcgtagttgcggggaagggtggggttaggaggtaggcgttgggggcggtttttttgtttcgttttttgtagttttgtggttttgattatttagtttggttttaggatggagtttcggtttttagatatatggtattgggtgaggtcgttttttagtatttgttttaggaagttagagtagttgttagaagagagaggagttgtgtttgtattcgtcgttttttaggttcgggatagttgtcgggattgagggtttgtataatggcgagtttgttcggaggggcgcgtcgcggttagatagttatgttttgtgcggtgtggatagagggtatatttagttttggaggagcgtatttagatttttcgtttcggggtttaaagtgtgggtagtttttaattagattttggattttagtagatagtttgggaggatgttatgtggtttattttgatatattgttttatttgtgattttatttttgagagttgtagggaggcgtttttttagttggattttatttttttttcggggttttttgtgggtgttataagtgattttgttttttttagtttaaggggggtttttggggtatgggttgtaattgataggttagagtagtttatggttagggttgagtttttttttcgttttttttgaatattgggtttaggaaggggttaaagtggagatgttttgattaaagttgagggaggtatggagtttttttgattttgtttttttattttattgttgttattgggtgtattttgtggagttttaggatttttaaagaatttagagtggagattttcggttttatttagtgtaggtgagggggaaagtgatttgtttatagttatatggttattattagtatatttgggttaagttcgattttattttacggtttttgtttgaaatttggaattggaaatggttttggaaattattgattttatttgtcgttttttaaaatggttcgtagaggttaagatatagatttttgtaatgttttgtttattcgtgtgtggggaaatggtagaggagtatcggttttgtttttatattgtttgggttgtcgtttttgttttgtttagtggtttttttttttggttcgtttttttattgtggaagtgggtataattttttttgtgtagcgtggttagagtggatagtgatgattcgtgaagtagggtggagcgtttgggggattcgtgttaaataagtatataaataaaagttaatataatttttatttaattagtaagtaggttttgtttgaagtttttgggtagtattttatgttatttttaggttttaggtcggtggtgtcgtttcgtgttttttttattcgtaagttggtgtttagaagttttgttttgtgttttggtttttattttttttgtgatttttttttttttttattttaaaaagtaatgtacgacggggcgtggtggcgggtatttgtagttttagttgtttgggaggttgaggtaggagaattatttgaatttaggaggcggaggttgtagtgagttgagattgtgttagtgtagtttagtttgggtaatagaataagatttttatttgggaaaaaaaaaaaaaagcgatgtttagttatttttagatagaaaatgaagattatatgaaatttggaaagaagttttttttttttattttttaatttttttttaaggggtggttatgttgatagttgggtgtggtatttttttgaattttatttttgtagagttatttagggtttgtgtaaaaaaagttaatgtgtaaatatagattttttaagaatataaaggaaattagatttttgttattagtttttattttttttatttaataatattgttgttatttgtagatgtagtacgtttttttttttttttttttttttttttttttgatagagcgtggtttaggttggagtgtagtggtgcgattttagtttattgtggtttattgtaatttttatttttcgtttttcgtttttaagcgatttttttgttttagttttttaagtagttgaaattataggtgtttgttattatatttggttaatttttgtatttttagtagagacggggttttattatgttggttaggttgtttttgaatttttgattttgagattcgtttatttcggttttttaaagtagtacgttttttttaatggttgtgttattagttgttttatggttttgttaggtttgtttagttttttattgtgattgagaggttgtaatagatgttttcgtatttgtatatgtgtatatatgattgaaggatgagtttttagtgaatttttgtgttaaggatgtgtgtatttaagttttgatttgttgggtatagtggtttatatttgtaattttagtattttgggaggttaaggcgggttgattatttgaggttaggagtttaagattagtttggttaatatggtgaaattttatttttattaaaaatataaaaattagttgggtatggtggtttgtgtttgtagttttagttatttaggaggttaaggtaggagatttgtttgaatttagtaggtagaggttgtagtgagttaagatcgtgttattgtattttagtttgggtgatagagcgagattttttattaaaaaaaaaaaaaaaaaaaaaaaattgatttttgtttttgaattggtttttaaagtggttattagaattttttaggattttttttttcgtcgatttgtttagttgtttgttgggttttgtgtagtgatggtttagtagggaggttttatgttttttatttttggttgagggttaaatgttttttaattggtgttttattttgtgtatttcggttaagcgagagggattattttttcgtatgttataggttagggttttgtgttttttttttatttggaaggtgtattttttttttgttgaaattttttaaaaagagttttttgtaagttaggcgtgatggttaatatttataattttagtattttgggaggttgaagtgggcggattgtttgagtttaggagttcgagattagtttaggtaatatggtaaaatcgtatttttgtaaaaattagttgggtgaggtggtgcgtttgtagtttcggttattcgggaggttgatgtgggaggattatttgagtttgggagtttgaggttgttgtgagttgtggttatattattgtattttagtttgggtgatagagtgagattttgtttaaaaaaaaaaaagagttatttgtatatttttattatagtaggtacgagtattttgtttttagttgtttatttttgattttgtttttgggatgtttttttatatagaatattttaattttgatattgttaagtttttgtttttttttttagtttttggaatttatattttgtttagaggttttttgcgttttgaaattataggaaagaattttatttacgtttttttttagtatttttgtggttttatttttatatgttgaaattatgaatttattggaatgtattttggttttagtagcgaggtaggggtagatggtattgtttggatatatagtagcgagtttggtttggagcgggtggggcgtgtgtgtgtgtgtgtgtgtgtgtgtgtgtgtgtgttatttttattagttttggtgtttgtattgtgttggtttagtaaaaataatttggatgtattttttttattttttgttttttggaatattttaagtagtaatataataatttttttgttaaaattttttaagaatttattcgtgaaattatttgagtttgatatttttgggggagtttagtattttaaaaatttaaattttttttatgggtttgtgagtttgggagtttttttttttttttaaaatttattattattttttttttagaaaagtgttttttagtttatttaaaattcgttagtttatttcgagggggttgttttagttcgtttagtgaggatagtgtgtagcgcggtgattgatatgattgattagtagagtacgatcgattagtcggtgtgtaaatatgattgattgtggttagcgttttgggatgttttatgttgaggtatatgtgtgtagtgtagggtgatgtgtattttgagaggggatgaagttataggatttttgtatttttaggagagagtttttttttttaaggttgtagttttgagtaggtagtgacgggattgggtttagggggttgagtggttttagtaggttaagggttttaggaattatgagaagtttggagttgtttagagagtagtttttaaaattagtttggattgtagtttttagaaagatatgcgattgatattacgaattaggatatatttatatatggggtgggggtggggatgggatgtattaatgaaattaaattttcgtgatggaatttttatttttattatgcgtgtgttatatttagtatttttttttttttttttttttttttttttttttttttttttttttgtttgtttgttttggagagagggaaggtttttttttatttttttttaaatagttttattgagatttaagtaagttattatataatttattaatttatttatttatttatttttttgagacggagttttatttttgtcgtttaggttggagtgtagtggcgttatttcggttgattgtaattttcgttttttgggtttaattaatttttttgttttagtttttcgagtagttgagattatagatatgtattattacgttcggttaattttgtatttttagtagagacggggtttttttatgttgaggttggtttcgaatttttgattttaggtgatttattcgttttagttttttaaagtgttgggattataggtatgagttatcgcgtggtttaatttatttatttaaagtgtataattttatggtttttagtttatttagagagtagtgtaattatcgttattataattaattttagaaaattgaaaatttgagaaatttagaaaattttttttttaagaagaaatttcgtagtttttagttattaattttgttttttttttttatattttttttttatttgtgtggattttttttttttttttttttttttttgagatagggttttattttgttatttaggttggggtgtaatggtttaatttttgtttattgtaatttttattttttaggtttaagttatttttttattatggtttttcgagtagttgagattataggtttgtgttattatgttcggttaatttttgtattttttgtagagatggggttttattatgttgtttaggttggttttgaatttttgggtttaaatgatttttttgttttggttttttaaagttttggaattataggcgtgagttattgcgtttggtcgattttagatattttttgtatagagaattgtacgtttggtttttgtgtttggtttttttatttggtgttatgtttttaaggtttatttatattgtggtaggtgttagtgcgtttttgagtaatattttattatggtatggattattttattgtggatagatatgttgtttttattagttgagggatattgggttgttgttatcgttggtgagtgtattttttttaaattaaaaaaaaaatgttggttattatttattagatcgtttttttggtttatagggtgggataagtcggtttgggtgagggttaggaggtggttaggtggaggcggttggagcggttttgggttgtttttgggcgtagtaggtagaggtgtaatggtagagtttgagtaggttttttgggcggatttttatgtcggtaatgtttgtttatttaagaagtttcggttaggcgtggtgttttatatttgtaattttagtattttgggaagttgaggtaggtagattatttgaggttaggagttcgagattagtttggttaatatggtaaaatttcgtttttattaaaaatataaaaattagttgggtgtggtggcgtgtatttgtagttttagttattcggtaggttgaggtaggagaatttgtttgattttaggaggtagagtttgaatttaggaggtggaggttgtagtgagttaaaattgcgttattgtattttagtttgggtgatagagtgagattatgttttaaaaaaaaaaaaaaaaagaaaaaaaaagaaatttttagtgttgttttgtgttcggtatcgaagtcgagggaaggtagtattagtatgagtttttagtttatcgggtttttgtttggagttgacgtgcgattaaggtatacgagggaagtatggcgaggtggacggtgcggaggtataaggagtaaaataaggtagatgtagtggtttagtggtttttggtggttgcgaggagcgtgggtaggatagttttaggagggtatttggagagtagggtcggttggggtaaggtgtgttaggtatttgttaggagtaaaatgtaaggggatattaaagagtttaggaattaatatagatagtatttaatgtagtattttttaatatcgaaatgatgtatagtaatttttatgatgaataaatgttggaattttaaattaagataggtttagttttgtacgtgtatagttttgttagagtttgtttagcgtggaatttgatttgtttaaaatgttgttttaaaatattgtttgatttttggattttttggtattgttttaatttttgtatttggacgaaggttttattttaattttagttggagagggttaagggttggtgaatttggttttggatttgtagagtttgtggtatttgagaggtggggttaggaataggaaggagttggtgagaacggtattcggtatgggatggggttagattagagtagtattgtggttttttttaattcgtggttttgttgttggatgtttggcgttggtgttgagttttcggttttttgaacggagtgtgatgaataacggggtcggggagtttttgggtttttttttgaagtagtagtgaagttagggatatgtcggtagtaggtagggagagggacgtttggtttgtgtttggagttagttgttttatggaggagttgggtgaggatgcggtgggaggaagatttttttagttttgtatttttcgaagtataattgagtgtttgtgtggtttgggggttattttggttcgaggatagttttgttttgtttagttaggttttgaagagttatcgggatacggatagtagttttgttgggtggtaggttgtttattttcgtttatttaacgttggaattggatgtagagtatttggatggttagttttagagtgtttttgatatttttagttattttattttttagattaggataagatgcgggattttaatttcgagttttttatgggttttattttatgtgtttttataagttattgggtttattttttggttttagggttgtttggttatttggtattttggtttttttatttgtataatgaaaataatagttttagttttttcgaggagttataagatgtttttcgtgtgaaaaattgggatttggtattagattatttggatttgaattttggttttattttttttaatttgtggttttgggttaatttggtttttttgtttttagtttttttatttatagagttattttattgagttgttgggaggatgaatataaggaagtgtatttatgtgtttagagtattgtgattttatttattattattaaacgaggtatataataagtgtttaatagatgtttagtgttattttacggattttgtgtgttttgtgtgtttttagtagttaagttttggaggtggggaagttgttgacgagttgtacgaggtaattagaaagaggaggttataggtgtaagggtttgggtgatatttgtggatagagagaggtcgatggattttggtagaggggaagggggtttttgtatatagaaaatgttttttgtatttaagatttttgtgattttggaatagaggtagtagaggtttgtaaattttaaattataaatttagaaagtatagaatattcgtagagaggattagaaatattatatattttagtgtgtatagaattttttatatagttaaataaaagtacgtttttaattgaagttgttggagagtttttgaggattttatattagataagggtcggtaagtggaagtttaatacgtaggagttattttttttgtttataaatgtttgtcgttttttttgtttatattcgtatttatgtgagggtatttataggtttatcgtttagttttatgttttgtttgttattaaaaaattttttaagaattttttagttgtaaatttttttatcggagggggggttttaggaatttagttttgttcggggttggggtattttagtatttgttgtataggcgttggttattaaaggttatgtgtcgtattcgtgggttttcggggtttggtggtatttgggtatatagtttagtggcggttttttatttgttagatattgggagtggggggttttttatttttgttttttggcggtggggggagtgtttcgagttgttatatattagaatttatcgatttatacgttgcggtattttatagttttttgatagttttttagtttgagagattattaaattgagtttttggagagggtggttgttgaggtttggatataggtgtggataggatagttttgttttatttcggagtttcgtttcggtttagttttttgtgggtttgaagtttaggttgggttagtttttgttttttagatggtcggaaaggtagtttagttttacggtttttttgttaggttttgagagtcgtttggtttttagttttgtttttttttttttttaagatggagttttattttgttgtttaggttggagtgtagtggtgttattttggtttattgtaatttttattttttgggtttaagtaatttttttgttttagttttttgagtagttgggattataggcgcgtgttattatggtaggttagtttttgtatttttagtagggatcggtttttattatgttggttaggttggttttgaatttttgattttaagtgatttgtttatttcggttttttaaagtgttgggattataggtgtgagtcgttacgtttagtttttagttttgttttgatttttttttaaggtcgtgaggatgtttacgtttttttttttttttacggtttattgatgtttttagatgttttgtaaagttatttttttttcgggagttttttagttggtgacgggggattttttggggattattgtttaggtagttatgtaggtttgtgggtcgtgtttttaggttggatcgagattcggtgtatggggtgtttttggtttgagttgaggtttttggaagttatagttaggaggtagtaagggacggttgttatgtttttttttttttgttttttagggtttttgcgggatagatttttttgtttgagttttttggttgtttatattttggttttttaaagtttagtttgaagttttaggtattttataatttgttttttttagtagtttgttttgttttttttttgtcgatgtttttgaaatttttttgtttttttttattttttggttagagagagattggagattttgtgggaattttcgaggggagggagaaggtcgttgtttgaacggaggtggtttttttttttgtttttttttaggcgggttatatttgtaggtttagttttttgttgtggtagcgtttggggtgtcggttgttttttgggtacgagttgggagttgagggaggcgtttttaggatcggagtggtaatttagttggaggaggagtaataggttcgtggttagtagtagtcgtcgtagggatttcggcgttgtatttgtgttttagttgatttttttcgtttttttagggtgggtcggggatggtggtttgttgtttagtttaggaagaagaggggtcgtaattagtagtagttattttaggggattttagcgttgtatttgcgatttagttgattttttttttttttttagggttggttgggaatggtggtttgttgtttagtttaggaggaagaggggttgtggtttttattttagaggtttttttttcggtttttttttcggtgttggtttaattgtaggtttgttttaggtcgtgtcggtatttgttgattgacgtttagcggatgttgataggagagggttgggatggggaagtagtaagtttcggttattgtgggttcgggttatagatggttgaggtattttttggttatttttaggaagtaaggttttacgtagttttcgatttatttattgttcgtgtgtattttaggaggttgtattttttaaggtttttattaggtaattttattgggttgggtgtcgttgtaaaattatttattgggtgcggtggttttttggtggggggtatggttggggaggatgcggtggaggagaagttagtttcgtggttggggggagggcggattattcgttttttgtttgttttttgaattggagtttatggttttttttttaggtgtttgggttatggaagaggttatagttttgttttatttttgtggtagtttaggggagttttggttagtttcgtgttttttgggagggcgatagtttggttaggttgtagggtaggattggaatgtagatttttgtttggttatgttgttgtttggttgttttgtttggggattttttgtttaggaagagagaagcgggtcggatagttcggtttagtgattggaagtttagttttttatgtttagtttagtaggaagtttgttttttcggaatatttgcgtgtttttgtatgtgtttttttggttggtggttttgcgaggtttttattgggttgcgttatgttttttggttattttggttttggtgtttggtttttgtgaaatagagatatttgggtagttttttatttgtgtttgtaagtttgtgtggttttagtgatggttgattttgttttatttagaggatttgggaatttttagtttaattgtttagaggagttttttttagtggggagagtttgagttgtttttttggtggatagttttttagattttaggcggatttttttgtcggtcgttttttttgttgtttttgtttttttgttttttatttgttttttatttttttttttgtagtagttagttggtacggggatttttttttttttttgggattgtgaatgagacgatttttttggtttttttgggtttagatttttttggtaatagttagtgaaatttttgttttaggtgggaggagaaggtttagtatgtggttataataacggttttaattatattatttttaaacgttggtttttatttattttttgttttgtttaatagttatttttattattttattttttagattaggaaattaaggcgtagagagttttagttatttgtttgaggtttttatagttaagtgtttggatttgaattttggagtagtttggttgttgagttgttttggagacggggtattgtgtagtggtcggggtaggggtggagttttgtcgtcgttgattttcgggttatttggagtgataatatagtttagtgtttgggtttttgtttgagattttggttggatgttaggagttcgagattttttagtttttttttgtgtaaggcgttatggggtgaaatgaaagaaaattttagttagaaggtgtttttttttttttttagttttttagttgttttggattttgaaataagatatcgttcgtttgtggggtgagtaggaatagattggaatcgtatttttttttttttagttatagttgttaggagtttatttttttttgttttttttttttgtcgtttttttttataagattgggttggatgttgttgggaaagttaataggaagttttttggttgcggtggaggtgggggtttgtgtttttttggggatcgagatgagggttttaggttggtttcggtaagagtagggaggtttacgtttttgtttgttggttttgttttttgttttgggagaaggtatttatatgttttagaatgtattttttgcgtgtatagggatggtttttgggttatttatttgaggtttattgatttttttttttggaattggagtggtttttttacggtggattgggttgagttttttgtttcggtcgacgtttttttttaggtatttttttttatcgtgttagggtgtaggttgttagtggatgggtttttattttcggggattggtagttgttacgtttattttatagtcgagatattttggtcgaaggttttgttaagttttatggagtgtagggattttttttgagacggtttttttttgtcgtttaggttggagtttaatggtttaatgtttcgtttattgtgatttcgattttttaggtttagtagtttttttattttagtttattaagtagttgggattataggtgtgtgttattatgtttggttaattttttaattttaatttttttttgtagaaatggagttttattatattttttaggttgaattttaatttttgggtttaaatgatttttttgttttggtttgttaaagtgttgggattttaggtatgagttattgtgtttagttggggtttttttttaattttttttggttttttttaggtgtaggattcgggttttagttttatgtgtttttgaatagttttgggttttgttttgtattttttgggcgcgtggttaggtttttcgtgatattagtaggagatttaggtgaagaagtaggtagaacggaatgtttgtttatttagtttcggggttaggcggggcggttaggatagtagtagtggttggtgtggttttttgggaggttagtttattggcgtggttagcgaatggggaggggagtttttttttttgtttttttttatttttggtttttgggtttttagggttaggtttttagagttttaggtggaggatggaggttagggaagttggggtaagagcgggttgggggtgggtggttaggcggattttggaaaattattttttgtaggtttcgttttttttagggagtatttagggttggtttcggggagtcgggttaatggttatttcggatggtgtaggggtttatttttatgaaatcgggtttatttttatgaaattgggtttatagaagtttttggtttcggttttgttttgttttttggtttttgtttttaaagtaggatttaggatagttttgaattttttgtcgaaatgtagttttttgggttttaatttagttttttagaattagagtttttggggtgggttttttgtttgtttagtagtttttaggggatatttgtgtttgttagagtaagtttaataagtattgttgtaaatttttcgtttttatagttttttggttcgtttttttttttttgttgggatttgtattaggattaaatgttaatattagggattaggttatatttgtgaattttgagataatatttgtattttttttttttttgaggttgttttgttcgttttgttatttaggttgaagtataatggtgtgatatttatttatggtaatttttatttttagggtttaagtaatttttttgttttagttttttgagtagttgggattataggtttatattattatatttggttaatttttgtatttttagtagagatggagttttattatgttggttaggttggtttcgaatttttggttttaagcgattcgttcgttttagttttttaaagtgttgggattataggcgtgagttattgcgttcggtttgatatttatattttgattaagttgttgtggaaatattgagttttttttgatagttttgtttatagagtgaatgtttaggaatcggcgaggtattttttatttttatttagatggcggtttggaggtagcgtttttgattttgtgatgggatttgttttttttgtttaagagattttagagatgtggtttttgaatgtgggggtttttgttggggtgggaacgggagttggttttggttattgtttagtgattttattttagtgtttcgattttagtattttcgattttagcgttttttttttttcggtttcgcgcggagattacgtggtttgcgttgagtaattttttattgttttcgtcgcgtttttgttgtagggaagtttttttagggagttagttgatatatttggtttttattatttgtttttgaataggaatgaaaggagagagtgagtaagaaagtggtaggaggtgggggttgtagagtaggggaaggttagagagaggggaggaaagatttggaaagtttaggtatgtgttttggaagtaggtgttagcgatgagtttatttggagggtggtcgttcgttttgagttttgtttggggttagtagggaatattttgttagggtatgtcgttgggagtttgtttttggtttattttttgttgttttgagcgttgagtagatttgtttttattttagggataacgtaaggaggttgttattttattttttattttattaatattttatgaattataagtgattatttattgcgttttgacgtattttaggcgttgggttcgaagttttatgcgttttatgggatgtatttgtattatcgtcgtagaaaacggtttttgttattattgtagagaaggtatcgaggtatagagaggttgaggaattggttttaggttatatagttagaagcggttgattttggttgtgaatatagggttgtttgattttaaagtttgagttggtttgtagcgaggtttatggtttttgtgttattgtttgagtttttggtcgagttttttggtttagtggggggtttagtgatttattagttgttttattatatgttgtggatatttttacggtttatttgggtgggagggaaggggttttaggaggtgggaggggtatagggaatatagtttagtttgtttgggtttaatattttgatttttaaggtattttttgagggtagtatgaggttaagtttttgtttttttttaggattttgtttttgtgagggtttcggggttttttgtttttttttgggggttttgttggttaggattatagagaagttttttgttgttgatttttttgtttttgtattttttggtaagttattttatgatttagttgttttgtttgtaaaatgggttgaataatattgttttgtttcggagggtttttgggaggattaaatgagatttgttgtatagaagttttttgtaagttatgttgattggcggtcgtcgggtttttaagtgaatgggtattcgggtattgagtgtgtggatttagtattcggaaggaggggttggggggtatttagaatttttgggaggtttggatttttgttttgtttagattttgagtttttttttggttagtttaatttttattagtagggtgagggtaattaggatttacgtatagttgggcgaagtcgagtgattatatgtggaagtttagcgttttttatgtaaagtgggtaggcggttaaagtgagttttgttttagtttttttattttcggggttgtttttggcgttttgtttttttttagagttttattgatttgtattatgtgattcgggtttgggaagatgggtttagttgtgggaggtcgtgcgggttggggattgagagtgtcggaggagggttttttaggaaaatttagttgtataggaagtcgggttagcggttttcggaagtttttgggttttgtaagttggattttttagatttgtggttgtggggtttttttttgtttgtagttgagagtttttgattcgtatttgagggttttagaggttcgggagggggatgtgatcgtgtttttagggtgaagtttattcgagtgttattttggatatagtttttatttttttttggttttttttttggttatggggacgttgtttggggggggtttttttatatggaaggagttgtagttgagttggcgggtttcgtatatttttaaggtcgtttgatttttagtttttaagtggggttgtatttattatttaggatttggagttttagttagagagggattttttattgtttttttttttgttttttgggaaaggtagggtttttgtgtttttttttatttagggatttggtatgttgggaggttaagaggaagttgtttttcgtttatttattttttaatttttttagttagtagagttttatttgtgtgtttagaatttgtgcgtggagttagaagttataaggttggtttagttgtgtttgattttggttgtgcggttttggatagttttagtttttttggagttgagtattttgatttgtagaggagaggttgttgtgtcggtttcgtagggttttgtgtagaggggagtgtgtgcggttgtgagtttaggttatgtttttagattggaggataggatcggaatagtgggttaggatggttagagggttttagttttaggaggaggtttttatattttttagtatttttatattaggaaatgtagttaggtttttaggttttttatgttaggaagtagtatttcgttttttatttttggttgtttgggtttgagaagttgagtatttttttcgaattcgagtgttttttgatttttgtttgggtagttgttttttttgaattgatcgtttgttttatatagttttttgtggtttgttcgatagggtggttagcgagttttttgtatagtatattttttttaggagtgttgtttgtgatgatggtgtaaagggtgttttttcgagttttcggaggtatgtagtggcgtaatagcgtgagtttaggagtttcggtgagtttttggatggagaatttgtttagattattttttagtttaaattttttttgggtgtttgttgtgtttggggcgttgatttatcgtggggcggtttgtgagattttacgttatttggttattttttttagtttttgtttattgtatcggttttttggtttggttgtttttggaatatgagggtttatttttacggaagaatatttatttgtttttttttggaaagtttttttttagattttttggtcgttttatttaggttttgttgaagcgttgttattttggagaggtttttttgttattcgtagttaaaatagtttttttatgtttgtgggtggttttttatggggtatggatgagtattggagagttttgtcgtttatttgtttatatgttttttgggagggtaggggatattgatttgtgttgtgggtgttttgtatgttacgggtgtttagtgaatgtttgttaagtattaggggagtataaaggagggaagtttttgtttaattggagtagttagggaagattttttggaggaagtggtatttggtttgtttagaatgtggcgatttgtttgtatgtagatattagattagagggtaaaggttattattataatttagtagatagttataagtagttaaggaattgttatgatatggattgttcgtgattggagttaagaaggagttagagatagaggtttttgtgttttggcgtgagtttttgggggaggttgagtttttagaatgtggggtcgtttgtgtagaggtcggaggtgggagatatatttgtgagtgtcggtgagtgtggggtgagttattggggttggattagaagatgggaatttttaaatttattaattagttttggtgttttgggagtgataggagacggggtttttgggggattaatttagtataagtggacgagatgggatgtaggggaaaggataaagttttttgaggttttgggaagttgagttagggtagagttatgatagggtgagttttagaagtaatataagaaaaaatagttagattgggttttttttttattgtgggagatgttttattttatttttttcgtttttcgggttttggtaatgggttgggtatagtgaatgggttttatttgtaggagtggttatattttttgggtatagttgttttatatattgtattgagatgggattcgaggtcgggaagaatagttttttttgtaggttgatattgttagttttcggggagggaaggacggtagggggtttggagtatttttttttgttatttatattttgtgtttgtttgtagggttttgagttttgtttgttttgttttagttttggttaggaatttgttggagtttataggggtagttaggttggaataggaggagattaggtcggtaggggagtcgagagggggttttggatagtatttagggttgagttattttgggtttgttcgatttgttatttggagttgttttcgtttgtttattatgtgtaaggttttgatttattcgggtttgtttaattagcgtttttttttaggtttagttagtttggttttcgttcgatttatttattgttattagtgttatttttgtattacgtaattagtttttgtagtatgttagttattaagtttagggttttttgtgtattttttgtaatttttatagtaattcgggaggtatagagaggttgagtcgttggtttatagttatatagtaggtatggggtattgttaggatttagtcggatttttgattttagggtttttttagggttttgggtgggatattggtaaggaagtaaggtatgaatattggttttgttttggatagagttcggggacggtggtttggtaggtttagttgatatagtgattttggtgtaggtttaattattggtaaagtgtttaagtatatatagaattttaattggggagataggcgaagcggttaagggagggttgtgagtgataggtggatattgtatttattggtagattagttgattttggtgttttttggagttttttaatttttttatttagaaaaagaggaattaatagttttatttttaaattgggtgggagtattatattcgaaattgaagtaaagttggtcgtgttataggttcggtagatgttagttgtgtaggtaatttagtgattatttgaagtaggttgtgcggcggtatttttattttgtagatgtagtttagagaggttagggtattaattttgggttatatagcgatagtttaggttatagagagtagtgttggatgggagggtgttggtagttttaggtataggttgggagggttgtggggttagtagagggagggtatattttttagttggtggggtttttttgtgttttagtatttatgtgggtttaaaggagttggaaggagggaggttagagttatttatgggtttagaagttgataagtaggttattgattttgaatttgttttatcgtatgtaaattggggataaatttggggatttaatgatataatgtaagaagtagatatgttatagttttggttatatagttagtgtataataagtggtaagtcgttagaggaggtagtcggtgagaatgggagtattttagtagtttttcgttttttgtttttggttgtagatgtatttgtttttggttatttgtgttttagtttcgtgtttttcggtgtgtgtgaggttaagtttttggggtggggatttgggggtgtgtttgtagtttttgaggttaagattaaggttgaggtcgaggttgaggttgaggttattttggtgaggaggaaattgtaggtggagaagttcgttgatcgtgattttgatttgatcgtaattttgatggtgtcgatgtcgttagtacgtaggttttttgttttcgttacgattggtttttgtagtttatttggttgagaggtgtgttggttttcgtaggttgtaaaatggggatattatcgttcgtttgggttatagcgtgttcgtcgattgtatttggggagggattgagggttgattgtgttgtggggatgttggtagagaattagagagggtatttaaaaaggttaatagttcggtggggagaggaggcgtaaggttggtttttgttttttgggttttgatcgaaagggaataggggatatatttggggatagttttttttttggaggaagaagggtttagggtgttggtgtggagtttgtatagatggggataatgagttggagggtgttgggtaggagttggttagtaataggttgacgagggaggttttgttggttgggtttggtttttaagtgagtattttgagttgcggggatttagggggttttagagattttagagttgagattcgggattatagaggggtgggttgtgtttagggtaatatagcggatggggtagatgttgcgaaatttgtttttttgttttttttttttttgttatagaattggatttttttagtttatggttgttaaattttttagatgtttttgggttttatgggcgttttatattggtttttttgtaggatagtagattttgggggttggttttgatggtatttattatggggtattttatgtaagtatagtgtttttacgtttagttttttagtttgtggagtaggtttgtgtttggttagttttattttgtggttagaggagggagatagtggttttggagataggagttggtttggggttgtttttttagtttttgtttttttagtttatttttttgttttgcgggtgttggttatttttttttcgttagttttatttttagttttttttgttcgagtcgtgatttgttagtagggggtagtggaggttttgaaagtttttggagaggattttgaagtagtttttataaatttgtttttggaaagttttttttgttatatttttagcggtttttttttttttaatattttttttggggttgttatgtagcggggggtggaggaatttattaggtcgtggatagagtagagttatgttgatataaattttggttgaatttatatgttttttatagttagcggtcgattattggaattagggaagtgattttatagtaagggttcgtagagtagttattacgtattttcgattttggtttttggatttagttttggaaaagaagttagattttagttatttggagttgtttagggaagattttagtttggtgtcggttgatagtttattggaattttttatttgtttggttaggtgatgttaaggggtagaggttagaagtgttaagaagtaggtcgagggtggtggtttacgtatgtaattttaatattttgggaggttaaggcgggtgaattttttaaggttaggagtttaagattaggttggttaatatggcgaaattttatttttattgaaaatataaaaattagttaggtatggtggtgtacgtttgtaattttagttattttggaggttgaggtaggagaattttttgaattcgggaggtagaggttgtagtgagtcgagattgtgttattgtattttagtttgggtaatagagtaatatttcgtattaaaaaaaaaaaaaagaagaagaataagaagtgttaagaagtatttgtttttttgattgaaaagtaatttttgttgggcgtggtggtttacgtttgtaattttagttttgggaggttgcggtgggagagtcgtttgaggttaggcgttcgagattagtttgggtaatagaggtgttaggggtagtggcgtttgtttgtagttttagttttttaggaggtttaggtaggaggattgtttgagttaggagtttgaggttgtagtgagttatgattatattattgtattttagtttttgggtgataggatgagattttgttttaaaaaataaaatataaataaaaaattaacgtttattttttgtgattttaaaaattatatttatttgtgataaaataattaaattagaaaatgtaaaggaaatgattaataataattgcgttttttagataaatattgttaatatgtttacgtttttttttagtttttttttatatagatatttaatatttattaatttgttttgaattaaagatggttttttttgttttgtatgagaattattttagttaggtacggtggtttacgtttataattttagaaagttgaggtaggtagattgtttgagtttacgagtttgagattagtttgggtaatatggcgaaattttatttttataaaaaaatataaaaattagtttggtgtggtggtatatgtttgtgtttttagttttttaggaggttgaggtaggagaatagtttgagttcgggaggtagaggttgtagtgagttaagatcgtgttattgtattttagtttaggtaacgggagtgaaatgttgttttaaaaaaaaaaaaaaaaaaaaaaaagttgttacgttgttattttttttagggatttttattttttttatttttcgtttaagatttgttttgtaaaaggatgaggttaaatagttatgggagggtggtattggatgtttaaaaaaatgtttcgtggttggcgggatttagaaataggttggggaggttttagtagagggtggattttagttgggggtggggggtagtaggggggttttttatatgttttttttgcgtgttttatggggttgtttgtgaggtcgtgtgaattagagttcggttgggaagttatatgttatttggattttgattttttttggtagtatgattttagttaatacgtttaattatgtttttttttgtaaaatgggttaatagaaatgtttattcgagatatgatgagaaataaaggtgtttatagagtaaagtgtttagaacggttttggtatgataggagtttatatgttagtgttgtcgttggtatcgttattattacggcggtattggttgttttgttttttttttgtttttgttattttttttttttagtaggtttttatttatttgtttatttatttatggtcgaggtttcgtttgtgttaggtttggtgttgagaacgggggtagagagatgggggttgtgttttgttttttgatttaagggttttttttgtaatgtgaagtttttggagattggatttttaggttgttttattagtttttttttaggttagtttaattttttcgtgttcgttttttgagttgttagaggaagagagcgggaggaaggatggagtggggtttttgtggggattgagcggggggtgtgtgaggttttggaaatggtgtttgcggtatttacgtagtattagtttttgttgtagttgttgtttggagaatatttttggattttaggatattgatgatagaaggtggaacgttttttttggaagttattaagaggggattatcgcggcggttgagtagagttgttgatttgtgagttgtggtttgattatagttattgtttttatgagcgaggttttttgtggttttttttttaggaatttttggttttttggtaggggatagtttagggttgggggtgggtagtggtgtttgtaggtttttttggagttagagaattttttgtcgtcgtggcggggttgtttttttttgttttttttttttcgttgtgtttttagttgtttcgataggatgtttttggtttgagagatagaaattttaattttgaatggttttagtttttaagagaatttggagtttttttgtgtaaaatgagatgttttgagtatcgaggatgttgtgggggattttttattttattatttttagtcgtggtgtttttttcggttataggatgttgtagttacgttgtagggaaggagagtttttttttttgtgagtttagggagtttttttatgtagtttttttattggttattgtttgagattcgatttggtggtttttgttttaaggagtagaaagggggttcgttaggttagggtggggttgggtgcgaggatttttttcggttaatagggtttgtttaggtgttcgttttgttggggtagtagggaagggatttatatgtggtattgggatacggagaggtttttgtgtttgtgacggttaaaagggatggcgttttagttacgtttttatttatttcgaggtttagtatggttatgtcggaaatagtagtatcgttttttttattgttttggtttgtttttaataggttagaggggtggggttggagcgggcgtttgatttgtggttggatttagttgttcgtggataggttgtgagtgaatttgtagaggaagggagatgggaatgtcgggatttttttttgtatttttcgaattttcgttttttgtgagttagatggggagtgtatttttgttttttttttttgggtattttttgcgtttttcgttttaggtatttgatgttgtttgtttattttttttttttgtttttttcgttggttttttttatatggttttaattaggatttttcgttcgttggtggatgggtagagaggggagtttgttgtggggtttttttcgatcgggggattttttagtatagagttttttggtttttgtagggacgttgtgtgtgtttgtgtgagtttggcgtgttagaagcgttaagttgtagttgttttgtgcgttttttatattttttattttttaaaggttttgggtttggtgtttgtgggttggggatttgtgttggggtttttaggaggtttttggtgggagaggtagggtttttttttttttaatttgggtaattttgttttggtttgttgtttgcggaaagtgttttaggatacggtggtaggattggttggggttttggttttaggtttagttttagtttttgttagatttattttttttgtgttttcgtttattttgtttattcgtagggtttgtaggagtattttgagagttggtagggtggtttgttcggcgttcgtatagggtttgttggtgggtggttgaggttgcggtgaggtttttatggttttttcgttttgtatattttttttttgttgtgttgtttcgttagtatatgagttcgtattgtttttgagtttgtagtttgttttttttattaggtggttaagtagggtggtagttagggtggtagagttttattggtttgtaggggattttttgtgggttgtaggtagttttttgtggttgaaggtgttttggtaggatttgtattatgattttcgttaaagtttacgtttaaggtatttgtgggtattttcgttttagacgtgagggttggtatttttttttgtacgtgaagtaaaggtttgtttgaaggagcgtgtggaagtttgggtgtgatgaaggtaaggatcggtggtttattttttttgtatttggattttgggtggtaggtttggggtttttagtttttaatttaggagggtagttagtcgttggaattaagagtgaattttagttgttgttgttatagttggagggaagaggggaaaggaggcgttgtaggggagtagagattttattttttttttgtcgatattaggttgtcggtgttggacggggttttggtaatcgtggtaggagtggtgatgttcgatgatggtaataagggttttttgaggatttcgagttgttttaagggttttttatttggagtaagtattttttttaatttttttaataatattgtgaaattgattttgttgttatttttattttatcgatgaggaatttatagtttagagatgttaagtaatttgtttaagtttttttttgagtatggtagagggagggttcgaatgcggaaagtttggttttagtgtttttatttttaattattgttatttattttttcggttagttttttgattgtaaaatttgaggtttagaggagtgtagtgatttggttagtttcgtacggtaggttagtggtagagttgagtagtgttttttatgttttgattttgtggttttttgaggtggtttatttttaaatacgttttttatggtggttttgttttttttttttttttgaatttgttagtttgtgtttaggtagggggagaagtagagtaattatgtcgggcgggtcgtcgtgttttagtgtcgtttgttttatatttgattggtagtagagtggtttttttttggtgtggtttggaggtgttagtggttatttattagtatagtttagttttatatatgttatttttaaaggatgttgatatagaatgaagtagttaggggaggcggacgttttggtacgagggtggcgtttttggtaattcgtagtgttgttgtttgtggttgtttttggttggtattttatttttttttggttgttttgtagttatttgagggaggttagtatgtcgtttttattttaggatagtgtgaatgtagtagcgtaagtttgttagcgtcgtattgcgggatttggaggtttttgtttttgagttttgtttttgtgtaatttttaaagtacggattttttaggggtttttatttttttatttggaaaaattttatatcgtttagggtttgaggtagggttagagtatggagacgttgttggaggattaagggagaattgagcgcgtgtttttttggttttagtttcgtgtgtgtgtttatgtatgggtattttgttatttatattggtttttacggttgggtgggagttgagttgagttcggcggttgtttttttattttgcgggtttggttggggagtgtgaggatgtttgttggaagttaacgtgtacgaaagagttaatggtggattttatttttttagttttttttttagtttttttagggaaagggtaggaatagagaggttttatttttagaggaaggggtgggcggggatatagcgttgttcggtatagttttttttgagttattttgtatgttttattttatcgatttttgtagtttagttgtttagagcggatttagaaggtggagagagggtttttaataagtagaggatggagtgaatgtgagatttattattgggatttggtaaagtaaagagttttatttttttttcgtagatgggacgggggcggggttggagttagcggggtgggggtatttagtaagagtttttttttatttttttattttttttgttatgggtttttttttttacgtagatttttagtttggaatgattagtgtttagtttttttcgttttttttttgtttcgttggagggagtgatttggtttttggtttcggttatttatattttttgttttgttgtattagtttcgtggtaggggttgcggcggaggtgggtaaaagtcgttttcgggtagttagtttttattttgggagtgattgaaagtttttgggggtttttgtagggtgagttgtttattttggttttggtaaggatatttaggagagggttagggtgtttgtatttggggtatagtataaagaatagtcgtaagtgttttttaggtaggagggtgtcgaagtattgggaagttgggatttagaagtattgtttggggtggtgagtggaagatgtaggatatagatttacgcgattgtgtagattatttggttttattttttcggtttatagtggaggaaattagaggtcgagagaggtgaagtgagttttttggggttatatagtttagttaggtttagggcgtcgattttttgttttgttttttcgtgtttattcggttggtattagtatttttgttttgatattttcgtgtggtagttgttgtgattttgtgatttttttttattttattttagtggggttttgcgagggaaagaagaatgttttatgtagaagtggttggaaagtaagaagtttggagagaagtgaggtttttgtggtttggtttgagtttaggatttatggtttggtttttagggatggagtatcgattttttttttttatatttttattttacgtttttaggagttttttatggggaagtcggaatggatttgggtttagagattgtaaatttattttgttggatgtgtggttgtttttatgtaattaatttttttacggagaagttaggggatggtttttagtattttcgggggttttttagtgaggtgggaggatttcgagaggttaggaggttgtttaagattttttgttttttagggattaggtgagggtttgtcgattgttttgattttttgatgtttttggtggggagattttagaggggtttgtcgttattatcgttagtggttttggtttgtttagttatttttttggggtggttaaattttatgttgtaaaagtttaagtgaattttagtagtggtttgggagaattatttgttacgagttaaggatggagtttttggggaggattttttgttgttttttaatttttttcgggtatatttttttgtagttttattttttgtaagaaagttaggtgtttttcgaagtttttttttggttttaggttagaggtgatagtgggggttttttgtttgcgttggtgattgtggttggttgttggtgtttggttttgttttgtattgtgtatttattgaaggcggtattattcgggttttttcggtggttatgtatgggtgagtagtttacgatatatttgtttttagtatcgtgtgggtcggggtttttagaggggttgagggtttggatggttttgtaggggggtgtttttggttttgtgatcgaaaggagttgaaggtttggagaagtcgttgggtcgaggttagtttttatagatttggcgaggagggaatagatgtttacggagttgttttaggtattgtatatattgttttattttgcgttgatagttaagaggttggtttttcgtcgatttttattttatagataatgtgtttttttagttttttagtggtggagttaggattcgaatttacgtaggtagttttttgggtttgtagttttattttttatttttttttaggatttatgttttggggttggtaggataatgatttttagagttgagtatattttaatttttagtatttgggattacgttaggtgatatggtagggttagttaaggttattaattagttggttttaaaatagggagatgattttggatgatttatacgggttcgttgttattataagagtttttaaaagcgtaatagattatttgaggggtgtagtgggagaggtttggaaggaggaaggaggttataagttaagaaatgtaggtgaatagaaaatgtaggaaaacgtagttttttttgtagtttcgggagggtgcgtagttttgtggatattttttttgtagtttagtgaggtggagtgtgggattaatttgtgttgtttgatattataagtgtgtggttatttgttatagtagtgatgggaattgaatgttattaggtagtagtgtttttatttcggaagaattaggataaatttttttgtggattttaagttttgggagattttgggtttttttggattgttttagttttgtaattataggaaaggttttttatgtttgtttgggagaagaaaatttcgtagtaaatttatttttttttttgataaatgaaggcgagggtgtgggttggatatatgttttttttttgtggattttttttgttttaatatttagaattttgtagttgaaggagattttggggggttgtttgtttgatttgtaagtgaagaaatggaggtttagggaagttaagtgattggtttagggttatgtagagttatgttggaatattaagttagatagtttagtttttgttttaaagtgtttttttttttggttggggaggagggttggagggagtggatttcgagtaatagtagtattggtaggggttggaagagtagttattgtatttaggtgttggagtttttggttattttttgtaggaattaggtgatttattatggtataggtttttttttgtttatttgtagttttgggggttttagggattagaggatattttggtttgagggttggggtttgagagaagagatggaagtatttttagtttggtttgttttcgtggcgttttgtaggtatattcggtagtttaggggttttagagaatttggttggtgggcgtttttattttgtcgtagttgtattttgtggttagtagtttgtaggatttgggttgttgtttgtggttttgaaatagttattttttgagttgagtggggattaggtgagtagatttttatattttaattgttgtgatttttttgttttggaggttggtgggtagtttggttggtgttttatggtattttatgatcggttttgttattaggttcgtgagttgttttttttttttcgggtattttgaacggtttttttgagagtttcgttttgggttttcgtttttgtaggttttcgttgtttggggcgttttttttttttggaagttgggtttttttggggatttattaagaagggttttgtcgagtgttgttaaattgttttatttggtttttatttgttttatttattattttattttaatttttatgttttttttttggttttaagatttgagtaggtagggtttgtgaggtattttaggttttttgatgttgttagtatttaggggattgttagtatatatgtagggagggaaggaatgaaggaagagatgatttggggagttttttagtttttatttgtaattggtatattgcgataaaatatttatggtattttattttttttatatattttttttttaaatttatttttatttgagatggagtttcgtttcgttatttaggttggagtgtagtagtataattttggtttattgtaatttttatttttcgggtttaagcgagttttttgttttagttttttaagtagttgggattataggcgtttattattacgttcggcgaatttttgtatttttagtagagatggggttttattaagttggttaggttggtttcgaattttcgattttaggtgattcgtttgttttcgttttttaaagtgttgggattataggcgtgagttattgtatttggttttcgtatatttataaaagagaatttgtttagaaaattttttagatgtatttttagggttttaaggtatagatatatgaagtttgttagtgagtagttgttgtttattttttttttttttttaatttagagcggtttgcgttttaagcggatagttgtttttttttttttggttttttgttgtttacgtttttatagaagtagggagaagaggtaggaaggtgacgcgtgattattcgttgggcgttcgtatagtgtcgtttgtataggtgttattttttttatttgttatttttttcgttgagtttttttttttttttgtagatgagagagtattgttttttagaggttaagaaatgggtttagagttatttagttgattagcgtgtagttagatttgaattatattttgttgatttttatgtttgtaggtttggtttgatgagatggatagttgggtggtggagattttgagattttggatggtttttaaatagggtttgtagtttttggatagggagagtttggtataaagggtttgtggagtgagttgggggagaaggtggtttagggtttttgtttttgaataaatagatggaggggttattttagcgtttttttagtttttggtgtgttgggtttttggttttgggaggagagaatggagttggtttttattttgggttgggttggtttgggtttaatttagataagttttttagtttgttatgagtgatatttttgtttgttttggtgtttttgttaaaaatatgaagggttttagaatttttatttcggtttgttttttttttagatttggagtgggtttggggttgataatagttttatgttagatagtttgagtagttattagtgttattaggtttgatattgcggtttttgtttcggagggaaaaataaggttttttttgggggattttttgttagtttgtgaaaataggtttggagttagttagcgtttttatgtttagatatttcgtgtggtttttaaagtgtttttatgttgttagtttatatgattttttttaaaattttataagggagggtaggaagtttgagtaatagtttgttaagtatttatatagtaggtggttttattgttttttatttatagataagtaaattgagttttagggtggttatcgtttgttttttaagttatttagttatttagttacggaagaggttatgattttttatattttagtgaagttgaagattttttttttcgtttttaaaaatgtttattttttagggtagtgaatatttggtgtttttgtttagcgtaagaggtgaacgtttgttattttcgtttttttttttttattagatttgattttttttttgtgacgggaatattttgtaggtagtttgttttgtttttatagattttgagaaacggggtttaaattgtcggttgtgggtgggataggcgatattgtagtgaagaggtggagtatttttgtagcggggaagaaatatattttttttatttttttaggtttagtgtttgggggtttgtgaattaaatttatttaagataaattaatgagagaaaagatagatttaattatatacgtatgggattttattgaaaaacgtgatttaaaagagtaggtagaaggtggggttcgtgattggttcgaaggtagtgagttattttagttgattgtttatagttagttatagattagattttttgttttattgttttttttttttttatttgttttgttttttttgagttagagttttgtattgttgtttgggttggagtgtaatggtacgatttcggtttattttaattttcgtttttcgggtttaagcgatttttttgttttagtttttcgagtagttaggattataggtatttattattacgtttggttaattttttgtatttttagtagagatagggttttattatgttggttaggttggttttaaatttttgatttcgtgatttgtttatttcggttttttaaagtggtgggattataggtatgagttattgtatttagttaattagttttaaaaaaaaaaaaaaaaaaaaaagaatttagggttcgtatattattttaataggaaaaaaggaaggggtgaaagtatatattatgggtcgggtgcgatggtttacgtttgtaatttcggtatttcgggaggtcgaggtaggtggattatttgaggtcgggaatttaagattagtttggttaatatggtgaaatttcgtttttattaaaaatataaaaattagtcgggtatggtggtgtatatttgtaattttagttatttgggaagttgaggtaggagaattgtttgaatttacgaggcggaggttgtagtgagttgagattatattattgtattttagtttgggtaatagagtgagattgtgttttaaaaaaataaataaaaaaaaaaaagtatatattatggtaaaataaatgagtttttggaaagataaataggtttttaggagttgagatgggagatgtgaagttttgtgataatgtttttttaggtgtggtgtggaaattatttatattttttagggaagagttagttgtttttagggagtagatttgggtttgtatattattttaataggggaaatggaaggggtaaaagtatatattatgggttgggtgtaatgtgtttagtgtaggaggtagacgtggtttatggttgttgttgaaattagtgtagggttcgattgttttgtattgagtgttgaggattttggttttgtattagttatgagtttgtagttttgggatatatttgatgttggtttaaggggaaatgaggttggaggggtagggtggttggattggatgtgggtttggggttattgttgatttataaagtggttattatacgggaataatagagttggttatagattataattagtaatattatttaaaagtaaggttatatttttaataataagttatattttaagttattattaatttataaaatatattgttggtataatgatagttttttaagaaggatataaaaaggtatgttgggttgggtgtagtgatttacgtttataattttagtattttgagaggttgaggtcggcggattattttaagttaggagtttgagattagtttggttaatatggtgaaattttgtttttgttaaaaatataaaaaaaaattagtttggcgtggcggcgtatgtttgtaattttagttacgggggaggttgtggtagaagaattatttaaaatttgggaggtggaggttgtagtgagttgagatcgcgttattatattttagtttgggtaatagagttagatttcgttttaaaaaaaaagaaaaaaaagaaaaaaagtaaaaaggtatgttgaaggtatttgtttgtggaaagttgtaatttgacgggaggtagggcgagtattttttagaaaggtggaaatgggtttttttgttatagagatttataaatatagattgaggtttgtagtttaggagatttaaaagaggtaaaggtgaataagagttaaggtttttaagttagggtttgattttgggggtgggggttatatatgatggaggatgttaggagggttttttggaggtggtgatatttattaggggggattttaggtggggtttgcgagatagtaggatttggttgaagagcgtaggttttttagataggagtgggaatttaggtttgaaaatgagttggttagattgtaggggttttcgaatgtaagggaagaattttaattttaatagaggagtttgggaagttgtttgggaaaaggagtgataaagcgggaggggttttttagtagagttttgtatgggtaggagggagcgagatgggaggtgggtgttggtaagggatgattttagtggtttaggggagtagttatagggtggaaattaattttgtggggtttgggtaggaagggattgatttgagatatcgggaagaaatagttagtaggattttggtgagagggttgggggtcggggaggggggtgtggagagtgggagtttgagtttttgaaaatagatagtgttttaagggggagatttgaggtaagatgtggagaggtagttgagttgggaagttggaacggaggtgtggttattttaggagattaagttagggggcgaggggatttttgggagttatttagattttagtattagggaatacggaggggagaaggaggggagaagaattagttggtgcgtgttaggtattgttttcgaggttagatggggtggggttggatattggttatgaggatttttttaagagttgggttaatagtgagacgggcggatattagatggttcgggttaagaagtaagtgggcggtgggaagttagaagtcgtggtgtagatttattttgagaggttgggttgtttagatagggagaaagtttatagtttgaggaggtagataggttaaaggaagagggtttgtttgtttttgagattggggtattttgaacgtttttttaggttaagtgagaagaaattagaagaggaatatgttatttaaatgtgttgaaatagtttagtagttgcgttgttttatagaaaatgtgtagaggtttttttgttttattatgtttgtttggggacggtttttattcgggttatttagggtttttttagtttgttaatttaagggtggtaggagttgtgggtgtttttagtttttttttaaggttggtttgtgggtagaaatgtgggttgtttcggggcgttatagttataaatgtatattagtttttagaattatatttttgttttttagttttttttttcgtatttttatgtagaagcgcggtcgttagtttataaaggatagggagggatattgtttttggtatttgatgggaagtatttgttgtattttattggggtgttgtttaggatggattggaaaagagttggtaggaaggttgagttttgtgtttataatttggtttggtggtggtcgaggagtttggtaggagtagagtgtaggatttgggaattgggggttggtgtatgtgtgtacgtacgtgtgtgtgtgtgtgcgtgcgtgttgggtgggtagggaggaagttgtgaaattatatttttttttttttgttgttgtgttgttgtgtgttttagtagtacgtgggtgttattatattttttagtaggtgttaatttttaagattgttttgggttttttttttagttggttgagttggaggtgggagttttaattgttttttgtggtttttagagtgggattttgttgtgggataggttggttaatggtgtttttttttttgtgatttttttgttgggtgggttacgaggaaggattgtgggtgttgtttatagataggtggatatgtggtaaggatattttgggattttttttttgacgttttttgaagggggtatttttttagttttgagatgagtttttgtggatgtgggaagtttattattttaagagtagtagttttggaaaatttaatatagaatttcgagtaggggcgggaaggggttttgtttcgtttattggttgtttggtagagttttgtataaggaagcgtttgtgttgttgtgggcggaggaatggattgagggttatattcgttttttgttgtcgttgtaattgtttattataaatttagtggtttaaagtaatagaggtttttttttttatagtgttaagggttagaagtcgattagttttatcggattaaagttaaggtgttggtagaatttatttttgttttttttagttttgggtgggaggttttgttggagttttttggtttgcggttgtatttttttagtttttgtttttatttttttatagttttttttttttttgtagttagatttttttttgttttttttttttttttttttgagacggagttatttaggttggagtgtagtggtataattttggtttattgtagttttcgttttttgggtttaagcgatttttttgttttagtttttcgagtagttgggattataggtatgtgttattatatttggttaatttttgtatttttagtagagatagggttttgttatgttggttaggttggttttgaatttttgattttaggtgatttgtttgttttagttttttaaagtgttgggattgtagttatgagttattatatttggtttgttttttttttaaaggacgtttgtgatttggggtttatttgggtaatttttttattttaatatttttagttatatttatagagtttttgttgttatatgaggtaatatagtttgggaagggagagttatttagtttattttaggggtttgtggtgtattttagggtttttttgattttaagatataaagtaagaaaataaattggtttaaggggaaaaaaggatacgttgaattttgttgttttaaatgtatatttttttattgtgttaaaatgtatagaatataaaatttgttattagtaatattgagtatatttatagtgtcgtgtaattattagtattgtttagcgttagaatttttttattattttaaagggaaatttcgtatttatgaaggatttattttttattcgttttttttagtttttggtagttattagaatgttttttgtttttataaatttatttttaataagtgtaattttgtgtgattttaaaataaataaatatgagtacgatgagttgtttattggaaggatatttatgcggggaggtcggcgtgtggagtgcgtaggttttcggacgggtaggagttgaaggggcgtggatgtgtcgtttttttttttttttgttttttttttggggttattgtttgagtatttttttttgtaaatggttttaaataatgttttagtttttacgtttgtatcgttttttagttttaggattttttattaaaaaatattttaagttttagatttatttttgggaaaattttaatggttttatttttttttttgagttagttagattttatggtttgtggcgggttgtttttgagttttgagtatttgtgagttagggaagtaggataggtatatttagggaaggggaagagtcgtcgttagttatagtaattgatatttttggaatcgtttaagagatatttagcgtgtgtttaaaatatttatttttttttttgtttgttttttgagacgaagtttcgttttgtcgtttaggttggagtgtagtggcgtgattttagtttatcgtaatttttttttttcgggtttaagcgatttttttgttttaattttttgagtggttgggattataggtatatattattacgtttggcgaatttttgtatttttagtagtgattgggttttattatgttggttaggttggttttgaatttttgattttaggtaatgtgttcgttttggttttttaaagtgttgggatgataggtgtgagttaatatatttggttatatttattttttaggagaagttttgtattttttgaaagtgaaatgtttttaggcgggtgatattgatggtgggatttgtggttttattagtgttttatgagagatgtcgttgtgtgttttattaagttgtattttattgttttttaaatgtggtttgtagatatggtgtcgagaatgatttgggaggtttaaattataatatggtttaaattaatagttttttgatgatttggtattattttaggattaaattgagattattcgaggatgggcgtggtggtttacgcgtgtaattttagtattttaggaggttgaggcgggcggattaattgaggtttgtagtttgagattagtttggttaatatggtgaaattttatttttattaaaaatataaaaagtagtcgtcggatatggtggtgtacgtttgtagttttagttatttgggaggttgaggcgggagaattgtttgaatttaggagacggaggttgtagtgagttaagattacgttattgcgttttagtttgggtgatagagtaagattttgtttttcggtaattaaaaaaaaaaaaaaaaattgagatttttcgagttgtattgtttagtatgatagttattggttgtacggggttatttgaatatttgaaatgtggtgattttaagtggagaggtgtcgtgtgtgtgaagtgtattttgggttttagagttttagtaagggggaaagaaaagaatattaaatatttgttatttttatattgattatatgttgaattgataatattttgggttttgttaagtgaatgatattaaaattaatattatttgtttttatattttttaatgattttttttttttttttttttttttttttttttaaatatggggttttatattgttgtttaggttggagtgtagtggtacgatttcggtttattgtaatttttgttttttaggtttgagcgatttttttgttttagttttttaagtagttgggattataggtggttgttattatgtttggttaatttttgtatttttagtagagatagggttttgttatgttggttaggttggttttgaatttttgattttaggtgatttgtttattttagttttttaaagtgttggtatgataggcgtgagttattgtgtttggtttgtttttatattttttattgtaggtgttggaaaatgtaaggttgcgtttgtggtttatgtgtcgtttttgttggagggttggatcgagggttagtcgagaaggttttggggttgttttatttgaatgttgagtgtgtgttgagcggtagagaattttgagaagtgttgaaggatagaggttttgtgtgggggatgtagttttaggtcggagatgttttttttgtgttttggagatttttatttggtgatagtaagaggaattattgtaagaggggcggttattttagtaaagtatttaggatgttggttttttagtttaggaatttagaggtagaggaggggaggaggttgggtttggaggagagtagggttttgggttttgggaaaagtttggggggttagaaagttgggggatagattgaggttagaggtaaagagaagaaggttcggagaggagggttaaggaagaagggttttgtttacggggagggagaggtttacggggtaggggcgtggtgggagttgtattttcgaggttttttgttgattttgatatttggttagaaaggagttttttttggtattttttgttagcggtttttggagttgttttttaggggttagtgatgagggtgttttgggttgggttgtagatagtggaaaagataggttttttttatttttagtgttggggaaattagttttttggaggaagggggagttgtattttttgagtggtcgtattttttggtttagacgtgtgtgttttgttgtaattttggcgattggtgttggtggtgtttattttatggatggggaaggttaaattttatagatattgagtgataggtttagggttttggattttagtgtttgatttagaatttaggtttttgatttgttattagttttttttttatttagatgggaatagggatttcgggtatgtagtttttttttagatattttttcggttttggtttggcgttcggagattagtagtagtagttttttacggtcgtttattgtgagggtggggagggtcgtgggattaggaggttttagggggaaagttggttatgaggagtgggaagcgacgggttagatgttagtgattgttggttggggagtcgttggacgtggttggtttgtttggttagtgtggcgggtgtttcggggttttagttatttttagttacgtgtgggggtgcgggatgggaaaggtaagagtgtgtggagtttagttagtatttaatatgaggtttcgtgggggttgtttgagggcgtagtttttagaatttagtttttggtttttagaaggtgttattaaaggtttttttttatttgagtgaattttttttagtttttagtaagttttcggaacgagtttatttttaggcgtttttttttagtgtgggagtggttacgtttttgttgggagtgatttatttgggtttagaggtcgtggtattgagatgggtttggtagattttagcgtttaggtttagtttttatagtgttagtttttttttttggggatttttttgtttgtgtttttttgggttttagtatattttaggtttgtagggagggggagaggaagagattgatttattggttaggttttttaggggttggagaggttggagaggtaggagttggattagatttgaatttagaggttttcggaggaagagtttagggtgagttgcgtttttattttttgtttttttttttttgtttttttttttttttatggttttagttagtaagtatttggggtagaggggataaatttaggtggttgtgttttagttttggttgtaggtttgaatggttttttggggtggttggttatgttttttgagagtttagttgtggcgatgtttgagtaggtaggtgggggagtatttaggaagtaggggtgttaggtagagtataaggagagagggtgtttaggttagttttaggatttggttgagaggagggggttttttacgggtatcgtttttggtaagtatagggataagggtaaggacggtatggttagaggtttttgggagttttttttttttttttttttttagtagtttttttttattttttttagggattttgttatttttttttagcgtgtggtagttttttggcgtttttttcgtgtttttaggttgtttttgcgtcgggtttgtcgttgggcgtttttatttttgtttgttttttttttttgtttttttcgttttgtttttttggagtaattttttatcgagtttttttttttaggtagtcgaggtttttttttatttttgtttcgcgttttgggaggttttttgtttcgcgattataaagtttttttgattttttgttcggttttgagttatgtgattcggtgggcgggtcgcggttttcggcgcgtttagcgtagttcgacgtttcgttgttggggtgagttttgtttttttgttttttttagttttgtattattggttcgggggtttttaggtggcgcggtcgcgaggcggattttgatggttatggtggcggtgtcgggagttacgttgtttttgggtttcggttcgaggtcggtaggatcgagcggggtttttaggagaggggtggcggggagttcgatttttacgcggggattagattttcggttttaaaatagaagaatagggttttgtgtggttatagttatttttttgtaaatatttggttaattaagttgagtggttaagtttttttgttgttcggagttttttggaatatgtttttttttcgtaaggggtttttttggtttttaggagggttaggaagaaattcgaattggttatcgttttttttaaaattatttcgtttaagttattatttttttgggttttcgaagatcggttggttggaggttggagatagttttaatgttcgaaatgtcgtaatcgaagtttttcgcggcgtcggtattgggatttagggagttgttgttatagcgtagttttggatttttggatgtgttggatatgtgtagggcgtttttgggaggagcggggagggagggtgttgttggcggggttggtttgcgtgtgttttgtttttttataatggtatgttgcgtgtcggttatgtagaggtatgttagtgagtaggggttgagggatttttttaacggatttgtttttagagggtttttttatgttgggagaattttagagattaaattatgtagttaacggggtggttttcggttttaaagtagggaggggcgaggagttttgtaggtaatgttatttgtttttgaaacgtcgttttagtgattttggggattgatttagtttttagtttgttgtattttatttttggtttttttttttttgtttttttatgtgaaatttgttgtgttttggttagaggtttggggaatagttttttgtttatttaagataagtttgtaattttttttttggagaaaaatatgttattcggaagtaggttgagtagtggttttttggtaggtttgttcggggttgtggagatagtatttgttggattaggatggagttggaatttggtttggattttatatgagaaaattcgttggaagaggaggaagtagaaaaaggttttattttttaataatgttgtgggttttttttttttatttattgttattttgttttgaaatttaatggggttacgtgtgtttttatgaatgttattttttttggttaattttttcggtagttttaggagtttttttttaggaaaaggaagaaggtgtttgtttagtatttagtatacgagtttttgttggaaaggtgggatttttgtttttttttgggttttttttaggttgagatgtggttaaggaaggtttgtggtgtggttcgttttttttaatgttcgtttttggagatttgagttgttgttgatttttagtttgttttttttgttttttggttatttttgtgtcggggtggttgagatattattgtattggttattttgtgtttttattagttttcgtttttgtaggttgttattgtgatggtgatggggttaatttagttgcggtggggaggatttattgtgtgcgtttggggggtggcgtggggtattttgggatgagaagatgcgatttttgttttgagagttttgttttaatggaaggcgggggtatagttgtaggtagaagttattaagtattgtggttagattagtattttatgttaaaaatggttttgttggtcgggcgtagtggtttatgtttgtaattttaatattttaggaggttaaggtaggtagattatttgaggttaagagttcgagattagtttggttaatatggtgaaattttgtttttattaaaaatattggttaattcgggtatggtggcgcgtgtttgtaatggtagttattcgggaggttgagataggagaattatttgaatttgggaggtggaggttgtagtgagttgagattgtgttattgtattttagtttgggtaataagagtgaaattttgttttaaaaaaaaaaaaaaaaagttttatttgggtttgggatttgtttttcgaatattgggtttattgtgttttataaggatttttatttcggaagttttagatttatttgggtaattagagtttttgggttgattattttttagttttggttagttttttgggttatcgtatttttttaattttttgttgtgttacggttggtttaagttgtttttattagataatgcgaggtatttttataggaggggataatttcgtttttaggagttttttttttttgtttttaggtttggtgtagtgtgtggtttttttgtcggtgttaaaggttttaaggtttttttaagaagtttgttattattattagtagttttcgttatttggtttttttgtatatgtaagttttttttatatatttcggatgtttagggttttcgttttttttttttggtcgggagtgtgggaagagggttttattttaatgtttgagagtagggttaatggttagggtaagttgtgggggttttttttcgtcggtttttttttgtagtttttattttaatatagagtatcgatattatttgggttttgggaagatttggaggttgattattttggaggtttttagcgttttatagttattttttggggaagaggttttttgagggatttgtggtttttggttgggattttagttttagagttttgtttttcggcgtcgagttttgatttgtttattgagtgttagttcggttttcggataggtagggatttgttttcggagtttagtagagttttgggaagtttttttaggagggttttcgagggtggcggttatgtttagttcgttgtacgtgtgagtttgtttgatgaggaattggttgggaaggcgcgggtttaattataggtttatgagggtttttttcgtttttatttaggaagtagcggagattttggtatatttagtatttgggtttgtgtttgtttagttgttggtggaattatgggagttttgtttcggggtttgtagagtagtagtgggaattttttttattttagttttttttagagttggttgtttaaattcgtcgtcgtttagtttttttttttttttttttattaattttgggaatcgtatattgtttattttatcgggtttcggagcgggtgtaggaagagagagtttaatatttagaggtttgggttttttgtaggcgtttgagttgttgtggtttgagttgggttttttgttggaattattatagtagatttaatgatttgtttgtaggagttgttttattttagtcgatttcggggttgcgggaaggggttgggttttggttttgttgggggtggggggttagtgtaaagggtttgaaaagtggtagaggtgatggtttatttgttttttttttggtcggtcggtttaaacgcgattggttttttttttttttttttttttttttttttttttttataaataatattaaatgcgatttgttaatgtatttatttgggtttagtagttggattatgggtagaagtattttagatttgttattttttttaagttaagggtggggaatattttttgtgagattttggtttttgagcgtttaagattgtttttggaattttaattttgggtcggttttaggggattgacgttgatggagttgttgatattgattttcggtttttgtatggtttttaggaagggggtttttcgttttttgtttcgtcgagtttggttggtagtattttttttttaggtttgtgttttcggtagggtttgttgttttcgttttgttttgtgggtgttaggttttaagtattaggtgattcggttattgaatggttattgaatagttatttttgttggtgtttttagtggaatgtgtatggacgtttttttttttttagatttttgttttttattttttagtttttgttttaggggttattataggattaggaggtacgtagacgtgggtggtatatttattgggtagatttagttttgaatttgtacgttttttttaagggggtttttagcgggcggggttgatggtgtcgtttttttttttgttattagaacggatatgaggattgtgttttgtcgatttacgttttgagtttttagacgttataggtgtttgtttaacgagtgtttgaatgaatggttagtattgtgtgatcgtagatttttaatttttatttaaatagtttgtggtttttgtgaggttatttcgagatagttttataagaatttttattttttttgtacgtttcgtataaggtttttttggggggttttttagaaaaagggttaaagagtagtattttttcggggatttgaatacgatttttttcggggtaggggattgttttggaagattttcggtatcgttttttatgcgttacgtgattaggagggttttggggtaggatggtgttttttgtgttttgtgtgttggggtcggaggaaatattgttcgtggtcggtgttatttgttagttttgaagattaatgatgggttggatagtggttttattgagtgggagggagaatcgttgttgtttgtagttggggggtcgggtgggtgggagtcgaggttagggagaatagcgtagatttggtacggagaggtttggaggaggagtagggggttttagttatttagggtgtagggacgttatacgaggagtaggtgtggtgtgcgtttttttgcgggttttttattttttggtttcgttatttgtattaggttttgtggtgagagggtatagagtggaggaaggtgtcgtggttagggtaggttatacgttgtgttaatggattgttgttatttgtcgtttttgtggttttgttgttaggattttttagtattaggtttttattattaggtatgggttttataggtattattggtttttcgaagttagggatagattttatagataatattgagtttttgtagttagggatgggtttttacggttagtattagattttagggattagtatcgggtatttatagttagggataggtttttatggttagtattaggttttagggattagtatcgggtatttatagttagggacgggtttttatggttagtattagattttagggattagtatcgggtatttatagttagggacgggtttttatggttagtattaggttttagggattagcgttgggtttttatagttaaggataagtttttacggttaatattagattttagtgattagtattagatgtttatagttagagatgggtttttatggttagtattaggttttagggattagcgttgggattttggatgattgaaggagggtacggttgattaaagttgtaggagttagtttggttattttgaggtattaagttattattgcggttttaggggatttagatttttttatttgtttttttgaattttggaattagatatatttgggtttagtttttgttttcggggttgtgtgtttgggatggttgttttatttttttgaagtttagtgagatggggacggttgtatagggttcggtatagatggtattcgatggtatagggttatttgtttgtatttatatagtttcggttttcgttttggttgcgtatcgagagttttatgtttagatttttgttgagtttttaagtttttggttatgttttaggtttttcgtgagaagtattattgtatggattatgtttcgggattttattttgggttgggaagtttgttttatttttttaagttttttttagaggcgttttatgttttattatttttattgtttgaggggttagataggggaatttagtgtgggaggtttagaggtgtcggagtagacgttaagcgagtttcgtgtttatgcgttgggttttggtagatattttgaatgagttttttttttaggaaggagattggggttttagtttaagttgtggttttaaattttgtgattaagagtggagaaaaggtaagatttttttttttagttttttagaatagtcgatagtggtggaaatatggggtttatattgaatttttttgtaatttgttgaagagaatttagtttatatttttaggggtggaggtttggtcgatttggtagtgtgttcgtttttttggttatagtttattttggatcgggtattttggtgtttttttttagtgacgtagtgaagttattatgacgtgtttagttggtgagaaagtgttttttgtaatgttttattttttttagagggtgaataagttttgtttattataaataattatttatagaatatatgaggtttaatttaattttgggttacggtagcgttttttgggtaaatttacgcgttattttagttagagtttgtgtttttataggttttttggatttattttgaaggggggttggattttttgtttgtttcgatgagagggttgtaggatagtttttagcgagtttttttgagggttgtaatttttttttttggtatttttttgttcgttaggaatgttttaagtttttagtagaagtttatttattatagtcgttttttattttgtttattattttttttgtttttatttatttagtagatttcgtgtatagtttagtgtaggatttagggtgggaaggtgtttcgggtgggttggagtaaggtttttagttagggcggggttttaaggtgggtttatagttaggattgtgatttgggaggtttttttttgttttgttttagtttcggtatcgtcgttgtttttgtgtttagtggagatttattggttttaggttttaaaattttagcgaggtttgtagatagggaggagttttattcgagggtagagtgattgtcgggtttatttgtttgttacgaattacgtggttttagatttgttatttttttttttttagagttatggttttttgtttgaaaaatggataatgatggttattatgttagggattattttgaggataaacggggatgaaattgaagaggtttagtacggaatttggatatagaagtgttaattgtgtgttattagttgcggtggttgttaaggtttaattatatggtagttacgggttgagtggcgggcgggaagtggggagtaggagtatgtaagatgggtatttttgaagtttttgatttagtgagataagtatatatttagttttaagatggagtgttttaggaaggtggagattgtaaaggttttgtggcgtaggagtgtgagttgtatttttgggttttttagaattttattagagtttagggaggaggttagtttagatataggggtaacgggagagatgggagtgagaaaatggtttggcgtttggaagtggagtttggaaaggtgggcgtggggatagaggagggttttgggggttatgggtttatgcgtttaggaggtggaggtagtgaacggggttacggtcggttttatacgtggtattattagttttgttgagtttgtatttgttttttaggttttttgagtgttattattatttggtattttttggtttgatttttgttttttgttcgtttgggaagagtgagattatttgtttaaagttttttagttgtttttaattattttggttgttttttggttttgtttagggttagtcgttgatttgaattgtttggtgttatttttttagatttttggggttttgttttggtattaatagttatttttatttttattatttattcgtatatttatttagtagtgttttttgggtatttatttagtaatattaaggcgttgagatgcggttgtggttaagattcgggttcggtttgtgaggatttcgtagttgttatttttttagagtatagttttagttaggtatattgtggggtttagaaagagaaattaatatattgtgttcgtttattttgagttgttataaggaatagtcgaggttggggggttatttgatttacggttttgtaggttgtataagtggtgttagtatttgtttggtttttggggaggttttaggaagtttttttttatggtagaaggtgaagggggagttggtacgttatatggcgagagagagaatttttagattttttttttttttgaaatggagtttcgttgtgttagttaggttggagtgtagtggtataattttcggtttattgtaattttagttttttgagtagttgggattataggcgtatgttatcgcgttcggttaatttttttgtatttttattagagatggggttttattatgttggtcgggttggttttaaatttttaattttgtgatttatttattttggttttttaaagtgttgggattataggtgtgagttattttatttagtttttttagattttatagtaattagatttttcggattttgtgatcgtggggagggtattaaattatttatgagggatttatttttatgatttaagttttattttttttaggttttatttttaatattagggattatattttagtatgagatttggaggggataacgtttaaattatattatacgtgatttttttgtgcgtgcgttagtttttatatttggttaagtagtagaagttttttttttgttttttgttgagagagcggtgggggagaaatgatttagggatgggaggttggtttttcgaggggttttggtgtttgtggagtgggagtgcgggaaggtttttacgttgtgtgtgtcgtgttgggttggttttttatagtttatcgtggtgtttttcgaggattgttggggaggaaagagttaattaatttggggatttagttgttgaagttattattaaatttgagtagtttaggggtttttttttttttgggttttatgttatttagtatagtggggtttaattgaatttttttttattttttaaggtttttggttggcgtggttggggtttgggatacggggagcgagagggtttgggttttttttagatttggagtgggtttattagaaatggtttaggaaatcgcgggggttatttttagtagttgggggtttttgtggttatttttttttggttttgttgagtagttttggtttttggagtttttagtaagggatgtgggggtttgttaggttagggtttttattgttgtcgttatgtatagttgtattttgtattcggggagtggggtgtcgagtggggtgtttgggaggtaggtttttttttgttttttttgtttagagattttggggatgagttgagtgagattttttcggtttttgattggttgtgtttttgttgttattttttattttttttaagtggaggtttatgatttttttttttatttaaaagggttatttagtgatttagtagattttagtttgtgttatttagggtttttttaaaaatttgtggggaggttgggtttggtggtttatatttttaattttagtattttgggaggttgaggcgggtggattatttgaagttaggagttcgagattagtttggttaatatggagaaattttatttttagtaaaaatataaaaaattggttgggtgtggtggtacgtgtttgtaattttagttattcgggaggttgaggtaggagaattatttaaatttaggaggcggaggttgtagtgagtcgagattatattattgtattttagtttggacgatagagtgagattttgttttaaaaaaataaaaataaataaataaaaataaaaatttatggggggatttttgtgtttattggttggtgtgaggagagggtgaggagttgtagagaaggtattaggttgaggatcgtttttatttttgggttatagaattgaaggaggggatatatgaaagatgtttttagattcgggttggaggttggggatattcgagggtaaggacgacgttgtttttgtttttgtttgtagaggagtgtatagggtttattagttttttgttgttgtttaagtgatagttttatggagatagaatttatatattgtgacgttgatttttttaaaatttatagtttaatggttttgttgtatttataaagtgattgtattagggttatttagagaaatagaattaatagaaggtgtgtacgtgtgtttagataaagagatttattattatgaggagttggtttattttattatagaggttggtaagtgttaagattggtagagtaaattagtaggttggagatacgggagagtttatgttgcggttttggtgtttatttgaaggtttaagatttaggagagttaatggcgtcgttttagtttcgagatttaggaaaagcgtatgtgttagtttgagtttgaagtaggaaaaatttgatgttttaggttgaaggcggttaagcgggaagaatttttttttatttaggttttgtgtttttttatttagatttttaggtttttgttataaaattataaagatttgattagaataaaatttgagaaaaaattttttttttttatcggttttggatttattggttgggattttggaaattagattgatagagattaataggaaataagtataataatttaagtaagttttatttgatatcgagtttttataaggaaatgaagatttagagaaatcgttagtttgagcggtttttgttttgttttgagataaagttttattttgtcgtacgtttaggttggagagtagtggttcgattacggtttattgtagttttgattttttgggtttaagttggggtttagttgtcggtttcgggagttgttttgaatttatttttaagttttagtttagatttttaagtagttgggattataggtatgtgttatttcgtttggttaattttttattttttgtagagatagggttttattatgttgttcgggttggttttaaatttttgggttcgagtaatttttttgttttggttttttaaagtgttggggttataggtgtgagttattgtgttcggtttaggtttgaatagtttttatttgttttgtttgttttttaaatttgtttgttgtttgttttgagtagtttttttgtttattttttttgtttgttttttgtttaggttggagtgtagtggtatgatttttgtttattgtaatttttgttttttgggtttaagttatttttatgttttagttttttaagtagttgcgattataggcgtgtgttattatattcggttgatttttgtatttttagtagggatggggttttattatgttggttaggttgttttttaatttttgattttaagtgatttggttattttggttttttaaagtgttgggattgtaggtgtgagttgttgtgtttagtttaggtttgagcgtttttatgttgggtttgatgaagagtggaaagtcgtgggaaattgtgatagagtaataaaagatgagttgaatagtgagttcgtgggggtttcggtaagatttgtgtattggggttttttttagattttttgtttttggagatgaggttgttttttttcgttgggtgtagggagggtattttttacgtgaggggtttatgatttattttagagaaggggtaggttagtgagttttttttggatttgttattttttaaatttttttagttgaaaatatttattatgttaaggtattgtattttggagtgtgcgttttaagttttgttgtttttaattgatcgggtgaggtttatttttattagagtatatagtttgttttatttaggtttttgattgtattttttttttgtttgtttcgagaatatttattagtagtgtttgtggttgtagcgtttattttaagataaatttgtcgggaagtattttgtttttattattatttttatattattttagtatatcgattttggaaataaaagatattattttgtttatagtattttatttttagtagtggtattttttttaaaaaaaaatggtaatttttagttgggtgtggtggtttatgtttgtaattttagtatttgggaaagttgaggtaggttgattatttgaggttaggagttggagattagtttggttaatatggtgaaattttatttttattaaaaatataaaaattagttaggcgtggtggtaggtatttgtaattttagttatttgggaggtcgaggtcggagaattgtttgaattcgggaggtagaggttgtagtgagtcgagatcgcgttattgtattttagtttggacgatagagtaagattttattttaaaaaataaataaataaataaaatttaaaaaaaaatagtaattttcgatcgttgaaaatgttaaattttagagaatatagtatttttataagtgatgttaatattgtttttgattagttgttggttgaagatttatttgatgaatttgatttttttagaatagacgatttagatgattttgttgttttgtttagaaataattgtaggaataatttaaaaaattttttttttttttaatttttttgttttttgagacggattttttttgttgtttaggttggagtgtagtggtacgatttcggtttattgtaatttttgttttttgggtttaagtgattttttagttttagttttttgagtttagttgggattataaggtgtttgttattatacgtggttaattttttgtatttttagtagagacggtgttttattaggttgattaggttagtttcgaatttttgattttaaataattggtttatgtcggttttttaaagcgttgggattataggcgtgagttattacgtttggttagtttttatatttaatttttatatagagtatttagttagatttgttttagttttaaagagcgtgtttatgtaaaattaagtgagtgttggtagtgagttgaattttttaaaaggtaaaagggttaaatattaaatttatttaaaaatatttttatagatatatttagaataatgtttgatcggttatttaggtgttttatagtttagtttagttgatatagaaatttttttttttttttttgagacggagtttcgttttgtcgtttaggttggagtgtagtggcgcgattttggtttattgtaagtttcgttttttaggtttacgttatttttttgttttagtttttcgagtagttgggattataggtgtttattattatattcggttaatttttttttttgtatttttagtagagatggggttttatcgtggttttaattttttgatttcgtgatttattcgttttagttttttaaagtgttgggattataggtatgagttattgcgttcggttgatataggaaattaattattatagttatatagttatcgttattaattttagtatattttattatttttaaaagagattttgtttttattagttaatttttatttttaatttcgggtttttagtttttagttatcgtttatttgttttcgtttttatgaatttatttgttttagatagtttgtataagtggaatcgtatagtatgtggttttggtgtttggttttttttatttggtagaatatttttaaggtttatttatattgtagtaggtgttggtgttttatttttttttatggtcgaataatattttatcgtggatagattatattgtgtatttttttatttgttgatggatatttgggttgtttttgttttttggtataattttgttgtgaagaattttgtagtgagtgttggtttataggtttttgtgtgaatatgtttttattttttttgggtaattgtaagattatgtggtttagttaattagtttttaagttatgtgtttgttgagggatttaggtttggtgggggtgtattgttgtgtttggttagttaggtgttgcgagttcgtgtcgtagttatttttttgtgttgtgttttgaggttgtttcgtcggtatcgggtattgtgagttttaggaggttaaagttttttttgttttattttgagtttaggtttcgttttatgaattaggatgaatggatattgaattaacgtagggatgggtggggttggggtggggacgtagagtgatttcgggggtttgtagttgggttttggttgttgatttttagttttttttgtttgttggagtttagaataagttagaaaggggaaatgtaaagttcgagtgttttttttgtggtagattggtaggtttgggtgggtgagttatttgtagttagttgtagcgtgagagaggaagtgggaggggagggagagggtgagtttggtgtaatttatttttggaaggaggttgggttgaggttgggggaagtgatttttatttttttgagaggatttttttttggggttaattttaaattaagggagataagatttttttgggggaggttggaagtgttggggtttttaggtgggtaggttttttagggttaacgttttggggaagttataagttattatgtttttggattgttatatatatatatatatatatatatatatatatatatatatatatatatatacgagtaaattgtaatataaatgtgtgtttatgaaagtgtttattttaaattattatatagtttgtaaagcgaaggttttggttcgtatttgggtatttattgtttagttagtcggtaggtagtttgtattgtagtttgttattattttttagagatgtagtcgaggagtttagttggtttggagggtttagtgggcgtagttttaggaaagtggttaggttcgggttaggtttttttttttttttagttttgggagaaattattatatgaatgtagttttttttcggagttcgggttggaagggtttgggaggggataggtttttattttaggagtttttaggtttcggttgttgtttgtgttagttgcgtgagcgtgagcgagttaggggttattattgggtggaaggaagaagcgggtattttttttaggaggttatcgttggagttttatagtaggttaattttaggttttgggttttcgggaggaggagaaagaagagaagtaggaggtgtggagggtaggttaggattagaaggtatatagggtcggggtagtgtgggagattttgggggtttttttatttaattagttaatattatagcgtttataagaatacgttattattgtagttttattattttgttttgattttagaaggtataattgatgattttagggaacggagaatttgaggaaggtttcgtaggagagggttagatgcgatcgagtaaatgtgagtcgtttgtaaattgtagagtgtacgtatagtatcggttagttttggggttagtgtttttttggtgtttagttcggtttttgtattttttagtgttcggttgggttttgtgggggttagggttgggtttggtatattagaggatttttattaagtttttggtagtgttttagttattaaatttagtttgttagttattaaattcgttttgtcggttttcgaattattttttcgttggggtcggttatgttacgttaggttttttatgtaggacggtagatggatagacgttgggattaagttatttttgggtcgcgagacgtttgattttttgttggtgttttagaagatgttagtttttcgtggtatgttttttacgcggtgtttggggattagtggtttttaaggggtttttttgttttagcgtggggagtggtttggttaaggttttagtgtttggttggagttaggtataggtttaggtgtattggttggaggttttttgtttatgggttttgtttgttttgtgtttttggtttttattgtgttttttgtgtttttgggagagattttaggggttttgagtttagtattggggttggggagtgggcggggaagagggtggggattagggtttttggttgtagaatagttaggttttaagtttttattttattttttttttatcgggcgttttattttatattgattattttttgaagaaaattttttgaatcggttttttatttcggttgttttaggaagtttatttattttttcgttttaatgttttgtggttttagaaggatggtggaagtcggaaattatgagttttatttataggcggttatatatcgaagtcgcggagacgtcgtgggaaaggattttggttagcgcggtcggtatagagggagcggtgttatcggggtagacgggaatcgtggttgtttttatgttggtttgggagagacgaggggtcggacgaaaggatagtagattggttatttatttatttatttatttatttatttatagcgttttattgggtgtttcggacgtgtaaggttttgtgggtagtgaatgcgatagattttagatagtaatcggagggttacgtgtgtaagaattgagggatttaggttgggcgtggtgttttaagtttgtaattttagtattttgggaggtagaggcgggcggattacgaggttaggagatcgagattattttggttaatacggtgaaatttcgtttttattaaaaatataaaaaattagtcgggcgtggtggcgggcgtttgtaattttagttatttaggaggttgaggtaggagaatggcgtgaattcgggaggtagagtttgtagtgagtttagatagtgttattgtattttagtttgggcgatagagtgagattttattttaaaaaaaataaaataaaataaaataaaataaaaattgaggaatttagtgtagatgagttatttcgggaaaataagtgggagttttaggaatagtatggggaagggatggtttcggtagggaggatttttgtgggtagttttgttggaagagttgaaaggtagttagagaggttgtgcgtggatggaagttgaagagtaggttaggggcgtgtgttttgttaataaagattttaagtatttattgattaggtataatattatgtgttttataaataaatattttatttgatttttagtatttttatgagatagatgttattattttattttatatgtaagaatattgaggtatagagtggttaagttatttgtttagggttatatagtacgtcggtggtaggtaggattttggagttataggaatttggtatattttaggtgtaatggaaattagttacggttttatagagggaaattattagattagtaaattttatatacgttttttggtgttttgaggaggagggattcggataggggtagttaatggtggtggttgtgagatgtgttgggttaatattgatgagagtttgggatggatgagtggattcggagtaatggaaatggagggtttaggttcggtttttggagatttagttgtaatagttgttggttggagaggttgtttatttagatgggggatggggtgggaggtaggtgagatgagagttttagagtttagtttggggtacggttattgggtttaagatgtttttagatgttggggtttgatagtgatagtggttgtagatatttaggatttagtagagggtttggtatagcggggtttagggatacgtttgtgagttaggttggtatttaagtgtgaatttggataaagaaggtggtattgttggtattgaatgtttaggggttgggtgaagttagttagggagaggggtttttaaggtattaggattgatttcgtgggtgagggcggaggaggagacggtagaggttgagagaatagttagagataggaggaaggttagtagagttatgtatagaagtttggagaagatttgaggaaaggaagggttgggtggtcgttattttttgtagttaggaggtaagggtgatttttgtgtgttttattttttagaggattggtggttttatttggttagaattttaagtttagagatgtatttgagttttatgttatggtgtaggtagtaggagttatggagtaggtttgcggggttacggtttgtttgttgttttttggtgtttttattttgagtttaggggttgtttggatgttttgtgttgtatttttttaggcggtgttttagagaggatgaaagtggttattttaaggtgtgattaggtagcggtttatgtatattgtttttttttggggagagtttgggatggaagggtatgtgtgtgtttttgagattttttgaataggttttatgtatttatttatttattttattatttatttatttatttatttatttatttatttacgtatttatttatttatttatttatttatttatttgttaatttatttatttatttatttatttatttatttatttatttatttatagttatttatttatttatttatttatttatttatttatttatttatttatttatttatttgtttatttatttatttatttatttatttatttatttatttatttatttatttatgtatttatttatttatttatttatttatttatttatttatttatttatttatttatttatttatttatttatttatttatttatttatttatttatttatttatttatttatttatttatttgtttatttatttatttatttatttatttatttatttatttatttatttatttaattatttatttatttatttatttatttattattcgtttatttatttatttatttatttatgtatttatttatttatttatttatttatttatttgtttatttatttatttatttatttatttatttatttatttatttatttatttatttatttatttttttatttatttatttatttatttatttatttatttatttatttatttatttattcgtttatttatttatttacgtatttatttatttatttatttatttatttatttatttatttatttatttgtttatttatttatttatttatttatttatttatttatttatttatttatttatttatttatttatttatttatttatttatttattaatttatttatttatttatttatttatttatttatttatttagttatttatttatttgtttatttattcgttaatttatttatttatttgtttgtttatttatttatttatttatttatttatttgtttatttatttatttatttatttatttatttatatatttatatatttatttatttatttaattatttatttttatttttattttagaaagtatttgaagttgttggggtgtgtatttggaaaatgcgttataagtttttataggtttttttttggtttttttatttttttgattggtttttttttcggatatgtaggattttgagtagtttttttgggaggtgggtgtagtttaggtaggttgtttgtaaagttaggatcgagggagttatatttaaggtattgtgggtttttaaggcgatggtattgtgggtttattgtttttagatttttttaatttttaggtttttgagtaggaggatttttggggtagggtttggagacgggaagagaaaataattttagttttttaatttttgttagtttaggtgggtgttgtatggattgggggtatttggaatagttggtttttttattttttttttttatttttttagtttttttggttataattagatagttgtgtgcgatgttttttttttttttgaaggggttatttagttaggtttttatttatggtttaggaatgtgtttttttttgtttgttttttatttttaagtaggtcgtgtttttagttttttgttgtttttgaagggtttgggtatggggtagtttttgtagtatttttagggttcgagttgatttgtatagtagaagggaattgggggaaagttttttttttatttagtatttggtagggggttattttgttgtattttagagatttttgtttaagttttgttattttagatgattttataagttgggggaggcggagttttagtttttatagtttttgttgttgttttattgttgagttttgttgtgtatttgttgataggtttgttgatagtagaaggggttggagagagggaagttttgggttttgttttttttaatttttgtttaggggatatttttgataagaggaaattttagtttgtgatagatggttagtgtttatttatttacgggggaatttttttttttttttgtaagtttgtagatttgttaggaattaaaggaatttttggttgataggttattgtggatatggttggagggttggtacgggttggattttggggttgttttgaggtaggggtcgtttttgttggaaggttttttggggtggggaaggtattagggttattttttgattttttttttgtagtggatttattttagagtttgagataaggtaagggggtagtagaaaatagaatataaaatagttttttttattatatatcgtattagaagttagaggatttatttttggtttgttttttttgtagtttaagttttgagagtggttttttaggaagtgaatggtgatggtttgtaggttagagtttgttttggtttaagattgatgttttaataggtcgcggagtttgggtgaaaaaatttaggttagggaggtggtgggttgtaaatgaaagaatagaggagggttttttttagaaagcggcgggtggtgtgaggagtttttggattttgtttaaatttgattttatcgattggggttaattgaaatcgtgttggtagaaaggtaaaattgtttgagatttttttttttataatagaggagaggtttgtttgaaagggtttggcgagggaaaagttggaggaattttggtcggtagtaaaagtggggattttcgttttttgtttcgggggcgtttcggtttttgaatgaatgaaagaggaggttggatggagatagatttatattatttgttttttttaggttttgtaaaggagtatatagggtttttgttggtttttttattttgttagttattaagaaggagaaaatattaataggggaattgtaaagttgtagttttgtttaagttttatagtggaaatcggaaagagttttagttcggagaaaaatgtagttttttgtttttgtaaattcgtgtttttttttgggaggttagagttattgtgttcgatttttaagtagggttttagagtgttttaggaggggaaggtagagttttagattttcggtattttaggttttaattaggttttgaggagacgttttttgttttatataaagtgtgaagtgtaatttgatttggagttagttaataaattagatgagttgtgtgtattttaaaaatttagtttttgattttttatttatatatatttgtataatttggttatttatatttagtgtttttatttttagaagagaataggaagtttttagtgatatttatggagtgtttgtagtagtttgggtaggttagtaggaatataatgtagtgaaaagtagagttgagatgggaaaatattttgtttttagagttttttagggatgatattttttatcgtttttgtttattcgttttggagtttatttcgtaaatagtaatttgtttttatttgagagtttttttttgtcggagtttagggatggagagtagttggttttagttttttttttttatttttttgttttttagatttattttttattttgaataattgtttttaatttgtttttttttttttttagttgtagaatttagaattttgtgtgtgtggttaaaagtttagagagtgttgtaggtaatgttgagataattttattaaattttgtaagtttttattatattaagtttgtttgttttttttaatttttattttattttattttattttatagggatggggtttcgttacgttgtttaggttggttttgaatttttgggtttaaacgattttttcgtttcggttttttagagtgttaagttatttttttaattgggatttacgggtttagggattttttgatgaatcgtttaaaatacgtgtgtgtttgtttgtttgtttttaatgtatatttttttagggagagtttttattttttattagaggtttgtggtatatatatgttttgtattattgtattagattgtgaattttttatatgttaaagattgttttaaatttgttcggaagtttcggttaataaatatttaaataaatgaattttaaatttttatgtgttattattgtttttattttgattatttttaagtttgtagtgttatttttttgttattgtgaagtagatatttaataaatatttgttaaatgaattaatgttatggttttggtttattaggattttaggattatcgtttattattattgtttatagtttttttattattttgttttagagtagttttttttttgaggtttgtttatttttgtacgtgtgtttagtttttagttttgtcgttttattatttttttttttttatttgtattttttgaattgttaatagttaataatagtttttttttttatttatttatttatatttgaagtgagaagttattattgaggtttttgtggattttgttagtttaatttggggcggttttttggaggtggagtttttagatgagggatggatattttggtgtttgttgggtagatttatttgggagttttggtaggggttttagggtagttttgtttttttattttggttgtgggatttttggtgtattagggttttttaagtaagtatttgtgttttgggagagttataggtaggtttgagagggtttttggaatttgggatttttagttcggtttagtagttggtattattattttttttgtaagggaagttatggaaattaagatgttaatgtgttttgataggtttggggtggttttaagttttgggaagagttttggtaattttttttggttggcgggtagaatttttttttggtagtttagggttttgtttttagttttttgggggagagtaattgagggaggagttggaggttaaggttttagtgttgagttgtttgtatcgtagttgtattttttgggttttggttgtaggaattttatatttttttagtttttttatggttttcgaagatttggtttggggagggggttagtagtttggggtttatttatttggttttaaattttggttttatcgtttattcgttttgcgatttttataattgataaaagttttttcggtttcggtttttttatttgtgaaatgggataataatagtggttattttataggattgtgtgatgatttattagttataatagtttttgagtagcgtttagagtaatatttggggttcggtgtagtggtttatgtttataattttagtattttgggaggttaaggtgggaggatcgtttgaggttaggagtttgaaattagtttgattaatattagtgagatttattttttaaaaaaaaaaattagagtaacgtttggtatagagagtttttagtaaatttcggttgttgtgatgagttttgtttttttatttgtttatttatttattagattttttgtcggggtttgtcgtgagttttacgttgttttgaagaaagtcgggttggggtgagcgtgatggatgaggtgtttggttttataaattttgtgtgggggggttgtggtgagaggaaatcgtatatattattatttagttattatcgtggggagattgtttggacgtagagagtaggttttgtgtgggagcggggagggtaagttttggttgcgaggtagggtttttttaggatttagtagggatttgaaggattttgtaggtatttagggagataggagaggaggagggagtagttttggtcggatattgtttttttagtattgtttgtattagggatttatttagttttaagaagtttttttgtgggggatagggagtatttgttagtttataggatttgaagtgtttttatgggtttaagtttttgggaaggtttgtaggtggtcgtagggttgtcgtaggggtgttggttttagggtttggatttaggggagtttgtagagggagggtagttggaggttgttttagtgtgtattgttacgaggtaaagtaaggagattgttgggtttacgttgggtcggggtggatggaggtaaggaagttttcgtcggggtaagggtattagttgtagatgtcggtagtttttttttggatacgggtttggaaggttgatagggtgtggtgagtgttatcggtttttttgtcgtggtttggttagtggttttataggttttcgtgggtaggaggaggatgattttgtattttgtttggttattattggtagtgatagataaggtgtgtggggatgtggttatttcggttcgtgttttgagagttaggtgtgggttgggtttggggaagataggggaatggtattgatttgattttgagtattttgttttggggtgtaggttcggttgttatttttttggagttgggaatggtattgggcggtggtttagggttttttgttttagcggtattatttttgtatttggttagtaaggttgatgggatttgtgtggatatttttgggacgtagattaggtagtatgatatatagggaggggtaggtagagaagggcggtttttgggttttggtttttaagttaggttttgtaagtttgttgtgttaagttttttttcggtattaggttaggtgggttagggttagttttggggttgtgatgagtgtgagtgtttttaaagtgtgttatgtttaatagttgttttttttttgggtattgttttttagttagatattttatagttttcgttttagttatagatagtaatttgatttttttattttcggtaggttttggggttggggtaagaatttgttattaagtgtagatgtttttagagggtgttggtttagggttgcgtggattatagtttttttatttttgttttagatttatttgtaattttggagaaaagatggtttagtggacgtttgcggggaggagggagttggtttttaggatgagtagatttgggggtagtttttattacgggatcggtgatttattgttattagcgttagtgaatggtagaggggttttggtataaggtttgggtttagaatgggaatttgtagagaaattgttaaggtttttcgttatttgatattttcgtttggttgttattttagaaatatttttgttgtaagaagatgggggagtttgtttggggtatggtttggcgatattaatttgagaattttaggtttaagtgttggtttttgggttttagttgttttttgagttgtaaagttggtttttgggtatttgtggaaaatattggattttttattttattttattttatattttgggatatatgtgtagaacgtgtaggtttgttatataggaatataagtgttatagtggtttgttgtatttattggattttttaatttagttttattagaaatgattgtttttttttttttttttcgttttttttttttttttttttttttttttttttttttttgttttttttttttttttttttttttttttttttttttttttttcgtttttatggggatataatttttatattatattattcgtcgatttagaaagtatagttgagtggtatttttttataattttttataagtattatttttaattttagaacgttttttttattttaaaaggaaacgttattttcggtatatagttatttttttttttttagtttttggaaattattaatttgcgttttgtttttatagatgtatttattttgaatatatgattagaattttaaaagatgtgattttttgtgtttggttttttgtagttggaatgtttttagagtttatttgtgttggcgtacgttcgtgtttttttatggttgagaaatagttcgttgtgttgatttagtacgttgggtttttttacgtatttgttggcggatgtgttagttatttttggagtcgggtgtgttgtgttatttacgggttgtattaggagttggggatattattgagtaagttatagtttcgggtatttaggagttcgtagagtaggagttgggagggaggttaggaggtgtatggtttgtttgttaggttggagagatttgtaaaaagttattttgagttagaaattagagtttgaggtttttgatttttagttgcggagtcgggagggaagttttgtattttgttttgattgtggggtgacgtgttagttattgtttaaattagaatttttttgagagtcgacgtgggtattgttgataattagtttggatattcgaaagaatggaaagtagggatttagatagatttttgtataatcgtgttcgtagtagggcgaggtttggaggtgcgatggggattttaacggggtagttgtcgttttgttggagtttacggtttttggggggggttataggtgttaatcgtatattatataagtaggagtgtgaaattttagggttgttaaatttagtgagggttttgtgttggtttggttatttatagtggtattttaggaaaaaaaattattttatggattttagtttttttattagtaaagagtaggttggattggaattttgtattatttagtatagttgttatttatgaaatgtggttatttaaatttaaataaaaatagaaatttcgttttttagttggattagtttagtgttaagtgtttagaagttatttgtgaatatattgtggtaattttttaaaaaacgaaaattagaattatcgtagtattttataattttatttttgggtgtggatttaaaagaatgtatagtattttaaagagttagagatatttgtatatttatatttatagcggttttgtttatagtagttagcgggtagaaataattcgaatgttcgcggttaaatgaatggagaaattaaaggcgggataggtcgggcgtggtggtttacgtttgtaattttagtattttgggaggtcgaggcgggtggattatttgaggttataagtttaagattagtttgattagtatggagaaatttcgtttttattaaaataaaattagtcgggtatggtggcgggtgtttgtaattttagttatttgagaggttgaggtaggagaattgtttgaatttggggaggtagaggtttcggtgagtcgagatcgcgttattgtattttagtttgggtaataagagtaaaattttgtttaaaaaaaaaaaaaaaaagggtggaatatataaggaatttgatttagtcgtaaagaggaagttaggatatttgtaatagtaagggtgaatttttcgggtattacgttaagtgaaataatttggttataaaaggataattttgtaggattttatttatattaggttcgtagagtagttagatttagaaaaatagtagaatggaggttgttagaggtttgggggatggggttggggagttgtttaatgaggatagtttgttttataagatgaaaaagttttggagatttgttatataataatgcgaatgtatttaatattattggattgtatattttaaaatagtgatcgtggtaaacgttatgataattaaaaggaaaagttacgtggttagtggttattacgttgagtagcgtaggtttcggacggtgtcgtggttatagataatggagtgggtgatttttattattgtttttagttgtttgagtattatggtgttttggggttaggatgaaagtgtttttgggtatgggggtttttgttttttttatttgggagttttgaaggtagattttaaagtttatttggttaggtaggagagcgaggcgggtttttgtattgttttttgcgtgcgtgtttgtttgcgggttagtcggggtttgtaaggtcgtttttcgagggaggggttgtaggaatggtttttatttgtgtagaaggtaagttattgttttacgttaatggtaaagatggggttcggttgcgttgtattattattttttaagcggggtttttggtgggtaggatgtttggtttgatttgagtttttgtagtgagtgttggtgtttgtggagggatttagttgtagttgagtcggtttttttttcgttttgggttttaggggcgttgggggcgagaaaggagagtttagggggtagcgtttttttttaggttttgttggggagggttgagggatgttggggggaggtgggggcgggtaggggttggttttagttttaggtaaaatggtttttagatttataggtagatggaagcgattttcggttacgtgggtggggattgaattgttgtttcgtaaggtaaggttttatgtttggttttaggaagcggttttaaagttatatggtttatggttagatgtagggttgtgtttttgtttatttaaaggttttggaagtttaggggagagtatttttgaagggggagtaggagtaggagtaaagttttgaaggtttttaggttgcgtggtttgggtgggggttacgtgggggtatagagagaggagttttggtttttaggttcgtttgtgggtattgtttttagtagtggagatgtgtggatttttttttggtattttttaataaggaattatattgtttttttgtttttttaattttataagataggaatttttgtgttttgtggaggttgagaagacggggaggtgtttgtgaggataaattagtttttagtttttggtttttagagttttttttttttttatttttgatgttttaggtttggggagttttttttcgatattttttgatcgttttagtgaaataggtcgagagggatggtttgaatcggttggggatgtaggttgtagttagggggtttagtgggtattttttgagttcggtttttgtttcgtaagtggaagggtagttgaattgaagttttttattgttttttttggtttggaagtttgttttttattttttgggtagagtgaggagtgggcgtgggtcgggagggttgttttttgtttgggagggttgtttatttgtttgttacgggggatgagttttttgtagtttttcgtgttgtggttttggtttttacgtcggttttatttttttgtggttgtttttgttgggtgtttatcggttttagggaaaagttatttttttttcggaggattggcgggaggggttttgtttgggagcgtgtcgtgtggtttttgttttagcgtaggatgtttgaggttagattttttttgggaggtaggatggggtaaaagttttttcgtaggtagagtagggtttggatgggtttaagtagggacgggggtatagaatagtagtcgtttagtttgcgtgggagttgagggttattaagggtagttttagtttgtggggattagtagaggtattatttttgtgattagcgagttgtttgtatttgtatgcgtatgtattagtgagtgtggcgagtttgaggtgtgttgggatttggttcgtgtattagttagttttgatgggaattagttttattttgggtatttttggaattttattgtgtgggagtatttgggtttttagtaggcgtttttcgggcgttcgtttttagttttaggtttttgattcgtgtgtggtgttttaatagtagttaggagtagggttatcgaagggatttatagatagaagaggttttagtgatttcgggaagtttagttttacgtgttttatatatttaagagtaaaatttggttttggtttgtgggtgtgtagttcgtgggcgttggttaggtatataagacggtcgtttgggttagtttagggggaggtagatgtggtgtaggggttttttttttttatgagtttaggaatagttttgtatttaggtattcgttttgtatttagtattttttttttttttaggattgttggttcgttttatgggattgaatatataattttatggggatcgacgttggttttattttttttttttataagattatttatggggatgtgggaggcggggatatacgttggttttattttcgttttttataagattattttttttgtgttttggttcgtggatcggtttttaaggtttttgagtggtagtaggcggtatagtttatttgagtagaggtgaaggagagggttaggtttatttgggtggttcgaggtagtgtggagggttaggagaggagagtattttttatttttgtttgagtagttttttagggtacggagataggagtttagggttagttttgttttggagcgtagggggtttttagtttggtatagtttttagaagaggagatgaaaaagtttggttttgggagtttggggatggagttttgttggggaggtagcgtggttgtaggatggtagttttttagaggatattacggttagggatatttattcgggggaatttttaggggtcgtttgggtaagtcgtttagtttttttgagttttagtgttttagtttttttatttaaggatgggtgtgataattatttggtaggcgtttgtgtgtgagtttttgtttcgttttaatttttttgttgttttttttttagttattgaggcggtttttagttgcgttggcgatatggtcgatatttttagagatgtcgggtttaagtaggcgtttgtattacggaacgagaaggtttcggtggatttcggttacgtggggattgattttattttggagtagatgcgtcggaaggttatgaagtagggtttcgagtttaatattatggtggtcggtgagtttttattttgtatgttatttaattaatgtcggaaattagttttagtttttagggcggtttataagtttttgggtttggtttttttttttgtaaaatggggtagtaattttgattttaaggacggattgttagtgatattgcgtgtgtatgtatgcgtttgggaggagtttatagtttttagcggttttttagaggggtttgttttgtatatttagggtttttgagatgattttggggagtttaggtcggtttggagtaggttttgatgagtggtcgttgtttttgagtaatgacgttagtttgtgtagagggttttgtggtagttgtttttttattgttgttttagtttggttttttaggttttttatcgtattttatcgtatttcggttagaggttttttagtagtttagttttagttttgttttggaattggggtttcgtggtttttatattttttggtggtttcggagagttggaggttattacgggaggtcgtcgattagtacgatttgggtagggtgagggggttaggttggagtttatagtgggtcgtttgttgtttttaaagttttttaggttttatttaaattttatagggattttgtgaagggggcgtttcgttttttaggtagaagcgaggtttagggaaggttgttaaggttttttagtttatagggtagagaatcgtagttatcgttttgatttttagaattgtgttttgtttattttacggggtttagggaggggtttggggaagtgttttcgttaggttatattttaaataaaggtgagtttgcggggtttttgtaaggtgtttgggtattttttaggtcgggtttgtttttttgatttttgttagtcgtgtacgttttttttgtttagttttgtggacgtaaatttatatttgttagttcgatatttttttttttttttttgtattgatttgggttttggtttttttggggttttggtgttttttttgttttttgtagttttatgggattcggttgtttatggttttgttgtgtttatagttgtttggaagttggtagtttgttttaagggagggcggaggtgtggggtttttttttacggtttttattttgttttgtttgttgtgggggacgtgtttgtattttgaggatttagggttgtttttcgggaagatggttggagagaaagagaggggagaggtttaaaggtagtggttaggttgggatttatttttgtgggttacggaggggttgttttgttttttagttagggatagggtgagaaggatttgggaatttttgcgttttagttatggtataggttttttttcggagttttggttttaaggagagggagaggtagtttagtagttttcgtttttcgtggttgttattgtgatagttttgttttttgggaatggtgcgtaggaggttattttatttgtttgggttttttcgtttttttaattttgagaagaatagtggttttgattttttataaaattatttttttttagggatgtcgagtgaggaataagacgtggggtagttttgtttttttttttttttttttttatggtagttgtgtttatttgtagaggtgtaggtaaggtggaggggtatttgtttggaggtttatagatttcggggagaattttagttttgttttaatttagcggggtgaggtttgtgtgtttttttttgggttttttttttgtgagttttagttttttcgtttataaaatgggattattttataaagtgagattaagcgagttaggtttcgggtagggtttttaataggttgtggttgttcgagaatttgtagtagtggtgatggtggttgtggtgatgaggatgatgggggtggtaatgacggtgatgatgatggggtgatggtgttagtggagatgatggggatgatggtgatggtggtggtgatagtggtgggatggtagtggtgatgtgggtgatggtgattgtgatggtggtggtggtggtgatggaggtgatggtgatagtgattatgagggtgatggggatggtggtggtggtgatggtgatagtggtgggatggtagtgatgatgtgggtgatggtgatggtggtgatggtggtggtggtgattgtggtggtggtggtgatgatggtggtgatgatggtgattgtggtgatggtgatggtggtaattgtgatggtggtggtggtgatggtggtgatgatggtgattgtggtgatggtggttatgatggtggtaattgtgatggtggtggtgatggtggtgatggggatgatgatggtgattgtgatgggggtggtggtggtgattgtgatggtggtgatgtgggtggtggtggtgattgtgatggtggtgatgtgggtggtggtggtgattgtgatggtggtggtggtggttgtgatggtggtgatgtgggtggtggtggtgattgtgatggtggtgatgtgggtggtggtggtgattgtgatggtggtggcgatggtggttgtgatggtggtgatgtgggtggtggtgattgtgatggttgtgattgtgatggtggtggtggtgatggtgatgatggtggtgattgtgatggtggtgatgggagtgatgttggtgattgtggtggtgaagggggtgatggtggtgattgtgatggtggtgaagggggtgatggtggtgattgtgatggtggtgaagggggtgatggtggtgattgtggtggtggtaatggtgatggtggtaaaggggtgatggtggtgattgtggtgatgtgggtggtggtggtgatgtgggtggtggtggtgattgtgatgggggtgatgatggtaatgtgggtgatggtgattgtggtggtggtggtgatggtgatgattgtgatggtggtgaagggggtgatggtggtgattgtgatggtggtgattgtgatggtgatgtgggtgatggtggtgttgatgggggtgatgatgttagtagtggtggtgatagtgatggggatgatggtggtgttgatggtgatagtggtgggatggtagtggtgatgtggttgatgatggtgttggtgttgatgattgtgatgatagtggtggtggtgatgagggtgacggaagtggtgatgatggcgggagtgatgggatgatggtaatagtagtgatggtattgtgatgatggtgttgatggggatggtggtgatgataagggtgatgatgatggtgatgataataataaaagtaataataataaagggatatattttgtagtattttagttggtattttttagatttaaggtgtcgtggttggaatattgatataatttttgatttgaggttggttaggatatagatttggtggatagagagagatggacgaggagtgttcgtttttgggttattaaatagtttaggttagggatttttagtattagtttttgtttttttaggagtttatattttttttagaaaggtgttattaaagttagaatattagtgtaatttagggtgttttttgtgttgtgtttttttgagatagggttttattgttgtttaggttggagtgtagtggtatggttttgatttattgtagtttttatattttgggtttaagtgattttcgtgttttaggtatgtgttattatatttggttaatttttgtgttttttggtagagatagggttttattatgttggttaagttggtttcgaatttttgattttaagtaatttattttttttagttttttaaagtgttgggattataggcgtgagttatttcgtttggtcgatttttgtttttttaaaagatagggtttttgttattttggagtggtaatgattttagtttattgtagtttcgtatttttgggtttgagtaatttttttattttagttttttgcgtagttgggattataggtgttcgttattatatttagttaatgtttatattttgatgtagagatagggtttttttgtgttgtttaggttggttttgaatttttgggtttaagtaatttttttgttttagttttttaaagtgttgggattataggtatgagttattatatttggtttagggtattttttttggtgtgttgttagcgtagtttaaggtagttttgtgtagggtaaagtaatggggtttcgagtttggaggggtgtgtgtgtgtgtgtgtgtgtgtgtgtgtgtgtgcgcgtacgcgcgcgcgtgttatatgtgatttgtttgtgtgtgttgtgagagttgtgtgtgaggtatgtgtaagaggtatgtttgaggtgagttgtgtgtgtgttgtgagttgtgtatgtgaagtgtgtgtgttgtgaggtgtgtgtatgaggtgtatgtgagttgtgtgtgttgtgttgtatatgaatgttatttttttattttcgtttgttttagttatttgtggattggttgtttgtatatacggttattgtttttcgagtggtattattttgtaggttagcgttttttagtatatggttttatagattttatgggatatgcgtgagtttgtttgatgtttatattagttttacgggggaaggattgtttattttattttgtagattaggaaattgagatacggtgaggttaggtgatttgtttaggttttggtcggttagggaggagtagtttgaatatttgggttttggttgtaattattttggtgaattgtaggaatttcggttatttggtgtattttgggtagttttgggttttttcgttagttcggtttttgttttgtttaaaatttgagttattaggagattttttgtttagaaagtataaggggtataagagatgtcgatttttttaggttcggtttattttttaggagaggattgtggtttgggttgtgttggtattagagttcggttgtgtgggtttatatagttattggatattcggttcgagggtgaagttttcgggggttgtttggtagggatattgtcgggaggtagtttaggtattgttgaattttagattggagagtttcgtgtttgggtgggaggggttttatgtgtagattttgttggttttttcggagagatttttgatcggttttttattttttttttagggtagagcggtttgggtaaatttattttaattaatattttttttaaatttaaaattagtcggaagtcggtgtagtttattttagaggagcgtatttttaagattatcgagattaagtttattacgtacggttagtggtcgggagtgggttgggggtgtaggacgtttttgtttttttggagtataggggttgggggttaagattattatatatagttagtggttaggggcgggttgggggtgtaggatttttttgtttttttggagtatagagtggggggttaagattattatatatagttagtggtcgggagtgggttggggatgtaggacgtttttgtttttttggagtataggggttgggggttaagattattatatacggttagtggttggggatgggttggggatgtgggatatttatgtttttttggagtattggtgcggtgtgagggtgttcgagttaggtaattttaggtttttaagacggggattcgttgtgtttattatttttagtatgttgagtatgttggggttttggttgtgatgggttagtgtttcggatttttgtgggtttcgttatattgagttttttatagataattgagttttttattaaaagtttgataggtaaggggtttttaggggaatcgttatcggtttgtgtcggagttggttgaggaaggttattaatttttcggtgtttttttggttgttatcgttgtttatttggggttgtttcggggttagttaggtgtggggtgtttgtgagggtttttcgttttttttttgattttgcgttcgtggttttgtgtagatattgaggagaaaggcgttcggatgaagttgatagtgattgatatattagggttcggggattatattaataacgagaattggtgaggtttttttagggggaggagtattagcgggggttttagggttttttggattttatttagagttagttttagaggtttttcggttcgcgggggtgtagggtttattttttgggatttgatatgttgttaaagtcgtacgttttaggggtttgaaaattttggattaaagtagaattatttggggaattttgttgtttttaatttattatttgaggttagttcggggaggttggtttgggaggtcgagggtaaggttgtggtattttcgtttagtaagttagattttttagggtatgtattttattggaaggtggggtgttgggttttgagttttgggaatgtacgatttgtttggggagggtattttatgtgtttgttgattcgtttttattttttacgtagttggtagtttattatgaagtttattaatgattagtacgagaaatatttgtaggaggaggttaatattaatcgtaagaagcgtatttcggatattcgcgtttattgttgtttttattttattttcgttatcggttattcgtacgtttttgtagtgtcggcgtttttatgtcgggtgttttgggttttttttgttttttgggattgtaagacggtgttgtttgttttgttgttgggtgtagaggggttgagttaggggttatggtcgttagttatgaagttgggggtgtgttatgtttgtatttttaaagttttatattgatttttatgtaagtgttttgtttagtttttattttttagttgcgttttggggagttgagggttaggtaggttttgggttgttttggagtttggtggtttgtgttttgtttttttaggttaggttttggtaggtggagtgggagtttttagttaagtattcgtagcggtgattgatttttttattcgggttttgttttatgggattttttagagggtttggtgcgtttttagacgggaagtatagagattagtgttggttttttttagggttggacggggttgttgttggtgttggtgagagtttttttttttcgtcggttttgttcgtatttgacgtcgtttttagagattagtaagggcgggaggttgtatgtattttggtaggtggattttttatggttttacggattttttgtttttagttttttgtgtattttttgttagatatttgtggtttattttgagttagggttgggaggaggaggattagaggttagtaggagtggttggtggaggtagtcgtgggtggtttgtttgtatgggtgggtggagaaggtttttcgtatttgttgttttagatgtatttttttgggcggaggaagtttaggggtttggggaaattatattttgtgggtattaggtgtaggaaggagtttggttggtgggtagcgggttttatttagagtttgtgggaaaatttaagtcggagttttcgagtttattttttggtattattttttgtgggttagtaggagttaggggtagggggttagttcgttgtttatgggttttttttgaattgaatatttgtttttttaggtagaacggtttatttgcggttttgtggtagttgttttagttgttttaagttttgttttagttgaggttgatggtaggaggtagaagttttttttgatgttagttgggtaagtcgagggcgggcgggcggtttgtggtatttttgttattttttagtattgattttttggttgggattttagttaggtatgttgtttggtttcgtttaaggcgtttagttttatggggtaggggcgggttttggttatttttgtttaaatttttgttcggagcgggtttttttttagttatgtgtgtgatcgatttatttttattgtgggaaaagttcggttttagaattggggaagatggtgttttagttttagggttttgttagtttttgttatttatagttttttttatattagattttaggtttattggggttaagtaggtaaggggagtagttcgtttggtgtaggggagtagttcgtttggtgtaggggtatcgtatattggtgttagtttttattttttttgtttttttttttttagttaaagttttatagtaagacggttgttgagttaacgatagtttttttgtgtggatatgtaggggtgtggttgggattttagaatttatggacgagggtgtttggagttggttttggttcgtttggtttgtgtagtggtgttatttgtgtttgggatatattcgtgttttttttttgttttatatttatagcgtggtcgattcggttcggggttttgtttttgttagtagggattttcgtgagtttcgagttagtatttgagagtgtcgatatttgtttgggggtgggtgtttttttattgtttcgtttttttagatgagttttacgtatatttttttgttttagttttaggtttttggatatcgagtttatgaaacgtttgagtaaggtggttaatatcgtttttgttatcgttaaggcggatatatttattttggaggagagggtttattttaaatagcgggtagggttttatttttatttgttttagtttttttgtgtaatttggagacgttgtaggtttggtaggggttatttcgtttaaaggagttatattgttagggagatcgaatcgttggttattttttttagcgggtggttggtttggtggtttttggtttaggtggttgttgggggtcgtttttgagatggtttttttagtttttttatattttaaaagtagttttgtgggagtgttaattttttagtagagtttttgaggggggttttggagaagatttggattaggtagatggtgaattttttttttagggagtgaggtcgagtaggggtcgtgcgatatggtttattttgttttatgttttttttttttttttttgagaaagggtttggtttagttgttaaggttgtaatgtagtggtataattatggtttattgtagtttttattttttaggtttagttttcgagtagttggaattatagacgtatattattatgtttggttaatttttgtatttttagtagagacgaggttttgttatgttgtttaggttggtttttaatttttgggtttaagggatttttttgttttagttttttaaagtgttggggttataggtatgagttattttatttcgttttgtttggtttttattagatggaagagaagttgggttaggtgtggtggtttacgtttgtaattttagtattttgggaggtcgaggcgggtagattatttgaggttaggagtttgaggttaatatgatgaaattttatttttattaaaaatataaaaatattagtcgggtatggtggcgggcgtttgtagttttagttatttgggaggttgaggtaggagaattttttgaattcgggaggcggaggttttagtgagtcgagattgagttattgtattttagtttgggtgatagagcgagattttattttaaaaaaaaaaaaaaaaaaaaaagttttaggagggatggtttttgttattttttttttcgttatcgtttgaggtttttgttgtgggatagggaggggtatttaagtaagagggtagttttgggtttttttttttgatagggtagtatattagagttatatggggtgttttttaaaatgaaatcgaggtgtttgggttgcggtattatatttgtttcggtgggtgtgggtggggtttgtaatttatttcgttttggggttaggtgttagggatttttttagtatgtgtaggggaagatagtttatataaagtgggtgtgtttgtcggaggttatatacgggttgtggtttgtgtttgggtaggcgagtagtcgtttattgggatgtttttgttgtacgtatttatgtcgggttgttggtagggagttgagaggttattgtaggcggggtttttgttggaattggggattgtgacgagggttttttaggaagggttttaggaggggaggtttcggtaattttgagtatttttttggggttgtgatgagtaggagaagagaggtgggaggtgtttaggacgatgattttaagtttttggggagttgtagcgtcgtttaggatagtaggtgtatttgtagttgttttttttttttttaggaggtataggagttggaggtgattggtgttatagttttttagagtttgtttttgaattcgagtttggggtagtatatagtgtggaggttatgtggtaaatattagtgggtgggtagagtttgttatagggatgggtttatttttttttttttttattttagattatcgtagatttgttgtttaacggtatcgacgtgtatttttagaaggaatttgatgaggattcggaggatcggttggtgaacgagaagtttcgggtgagtggatttattaggatgttgtttttaggggatttttagtttttgttgaagggtgggttgggggtttggaggattttaagttatgaaattatatttttggggttagagggtattgagtttaggtgtttgtatttagtgttgttaggttgaggttttcgtttttgggggattttaggtttagggtagtttttttcgggggtttaggggagggaattgttttttcgtatatgtgtaattaatatcgtttgttcgttttttaggagatgattttatttgttgtggtgggtagtgattacgagtattaggttaacggtaagaggatttttgggaggaagattaagtggggtattatcgaaggtattcgtcgtaggcgtcggggttttagatagatgggaagatagttttttttgttgatttagagtttgtgggttacgtttgagttagggattcgtggaattttatttattgttttgttttatttagagggaggggtttttttgtttttatttaatttttgggaaagtgagagggtaagtggtttgtgtagatgtttttattttagattttttttcgggtagggaaagatttagggagataggagttgggatgggggtcgttaagttttggattttggtgtaggtttttttataggtatttgtgtggttttggataaatcgtttaatttttttgggtttagaaaaggggtgggttgtagttttgtgagttagatggattttcggttttttattttgttgaagtttttgggatttttatattttagttttttgagtggttgttgtaattaattagtataaacgaggggatttaaaataatataaacgtatttttatagttttagaggttagaggttcgaaattaggggttgtttttttttgaggttttgaggattagttttatttatgtttttttttttttggtggcgtttggtatttttagttgtattgtaaaggtattatatgttttaatttttgttttattgttatagggtttttttttttgtgtttttgtttcgttttttttttttttttttttttttttttttttttgtttgagacggagtttcgttttgttatttaggttggagtgtagtgttgtaattttagtttattgtaatttttgttttttgggtttaagtaatttttttgttttagtttttcgagtatttgggattatagttacgtattatttatttgatttaatttttgtatttttagtagagataggatttcgttatgttggttaggttggttttaaatttttgattttaggtgatttgtttattttgtttggttttttaaagtgttgggattataggaatgagttatcgagtttgtttttttttttttttgtttttggataaggatgtttgtttttggatttagggtttattttaagtggatgattttatttggagatttttaatgaatttataaagaaagacgttttttaagtaaggttataattatgggttttaaggtttggattttgattatgtttttgaatggatgggagtttttggggggttatagtttaatttatttttggcggtgatatttcgggagggatgggttcgaacgttttttttttttttttttttttgtttttttattttttattagaatggaagaggggaaggtgtagagggaaatgtagtaggaaaagttattttgttttgggagagtatttggttgaaaggtttagtagagtaggaagtataagttttttaattttttagggttttagtttttattatttataaagtgggtgtagtgtgttaagattttagtgagttgagagattgttttaaagattatagagttttttgggaagttgttgttttaaaaaaatggttataatgataattattaggaggtattagatatttttgtgttattggttagatatgggttatttcgttttatgttcgaagtttttcgtatttattttttttgtagagttgaagaggtgttgtgagtagaaaatttgttaagggatttagaacgggaggcggttttagaatttatagttttagttttgtattagattttttcgagatgggagtttatgtttggaggagggtgtggagaggtatacgggttttttttttgtttgtattttttttttattattatttttgtcgggtttattttgcgggagttgtttagttgggtgtagtttgggtgttttttagtattcgtttgtggtgttaggttggtttgtttttttttggtttttttgtttgtagtttttttttttttttttgtttaaagagtttttgttgtttaggaaattttttatgaaaggtaggtttgggagagttagggatggatgggtttgggacgggtcggcggttttgttatgggcgtgtttttgttgtattttggtggttaattttgagtatcgtaggtggtcggtgatagaaattgttaggaaatgtataagagagaggttttcgtatttttttgatttgtgcgttgttgagtattattggttttagttgaggaagagtttggaatttgttaggatagttgtgaggtggtggggtttattttttagtagttttatatgaggattttggaaatgtgtttttagtattgttgggtttttatattaggggttttatgagtttatagttgatttgatattcggattagtaagggttgtgttttgtttttgttttttatttggtgaatagtattttgaggtattttttttatttttagaaattattttaagtattgttaatagaaatgtggggtgtaattgattacgttatgaatttatttaatttttatgtttttgagaggcgggtgacgttattatttatattttatggatgaggaaattgagggaatgagagtaatttgttcgagttagggagtggcgattatatattttaattttagtttgagagttttattttttttgtcggttttcgttgttcgttagtgttagatgagagtgttgttggttagtttgtaggaggttttagtgtggatatcgttttatatagggtcgtggtaggagggtttaggtaaaggtaatcggtatagtattgagagtatttgagggttgggtaaggtggaggtttcggttttgtttgttggtttattaagtaaaaattagatatttttaatttggggaaaagttatgtggttttgcgatggggtagtttggagttaggtgtatgggttttgtatttcgttttagttttatgtattgtggagttgagatagatatagtttttgcgttttttatgttttattttttttttttttttttttttttttttttttttttttttttgagacgaagttttatttttttgtttaggttggagtgtcgtggcgtgattttggtttattataatttttattttttgggttttagtgatttttttgttttagttttttgagtagttgggattataggcgtttggtattaggtttggttaatttttgtatttttaatagagacgagattttattatgttggttaggttggtttcgaatttttgatttcgtgatttatttattttagttttttaaagtgttgggattgtagacgtgagtcgtggtgtttagcgtttacgttttattttcgtaagataatggggataataaaggaattataagagatatttgtaggtgtgtgaagacgaagtttattatatgggagggtatcgggtgtttttatttgttttttttgttcggttttttatttttagtgatgtcgtttattgttttttttgttaaaaggttttttgttatataatagttatatatgttaggtatcgcgtgtttatataggagttacgaagtatagtaataaaatgattattttgagatggttattagttcgagttcgagggtatttgtgggtgttcgtggttttttgtttagtttttttgagaagtggttattgtttcgagtttgggtttgtatgtattgtgtgaagtgtatatgtttttgagtaatgtttagtattgttgatttttgagtttgtgaatggtcgtttatagtacgtagtttttgtgtgtgtttttgtgtgtgtgtgttttgagcgtatataaggtggatggggtcgtgggggtaatattttgtgggttataggttttttttaaaattttagtttcgatttttgttttattttatttttagtagtttagttttttgtttgtttttaggtttttgttgggacgttttgttttttttggttattttagtggtgcgggggtttattgttttggtttttttattgtggtttttttttatgtttttatttggtttggttattgtgttattttttattagttaggaattttttggagagtaggagttgagttgtttaggagtaggagttggtgttggttattttagtattttttagattgagggtagtgttaggtgttttatatttagttgtagagtaggtggtttttttgtttttttgtttatggggttgtttttagattttgtttttggtattagtatttttgggtagggggagagaggtggggttcgggtagagtttttttattgggatattaaagttttttttgtttttttttttagttgaaaatattatatattgtgagtttgtttatttgcgggatttttttattaggtgagagatagggtgtttgggtggggttgacggttttatttttaagagggttttatagcgggtgggggtagtgggtgtggggtcgaagttttgggtagagtgggtgttttttgttatttgtttgttttgttttcgggaagattttggaagtttattttttgaaaaagaaaatttattgggaaatgaagtaggtagtgaagattttttttaatttttgcgaagttggttggatgggaaggttgagttttgatttattgtggtttggttcgttagagttgttcggtggttattaagggtttagtgaggttttatgtgtaggttttgtcggtagcgtggggcgtttttagtttcgattttattggtttttgatttttattttttttatttggttgaggtttttttttgttttttttgagtttaggtaaggaggggaagttttgatggagagggtgttgggtgggtggtttttggagtgtgggttttggtttgggtaggtttttttttagtaagtagttggtatggatgatgggaatgttattaagaggaggggtttttaggttggcgggggtaggggtggggggatttcgggagtcgttttgttattgtggggatattgggttttttaatttttttttagattattttttttgagttgtagaggaatgaaaattcgagtttaggattttttttttttggggataagggtaatttagttttttgttttaggttatttgtttgttataggttatagttttggaggtcggtggttatttattgtttttattttgttagtattttggatatcggtttggagtaataatgttttagttttgtttttttgagtttatgtattgtttttgggttttggatttagggttatagggtggatttagagggagatatatgtattggaatatgtgtgttttgatcgagtttgggtttattagggggattgattttttttttaaaacgtgtattagatttggtttaatatggtgggtttgggggattttatggggagttaagtagtcgggatggggagtgggggtgggggtaggcgggtttgagttcgaggtaggtcgagtagggtttttgtttcgttgtttttatttcgttgcgtttattttattgattcgttcgttttttatttttataggacgtatatgtagaatattaaggatattattagtagtatttatttcgaggcgtatcgtgtgaagcgttttaacgagggtagtagcgttatggttaacggtatggaggagaaggagttagaagtttcggagatgtagacgttattttgtttattttcgggattttgtttttaagttattttcgtttttttttaggtttttttattattttattttattttatatgattttttttatttgttatcgttttttattttttcgatatgttgttaggaaataagggaaggggttttttttcgagtgagttagtgatgaggtcgcggttttttcgaggttgtggggaggttgtattggagttataggtaggggtgagagtatttattgaattgatatgattttttgtttttaggtttggtttttcgagggtttagaagagtagtttcggtgtgtagattattcgtttgtgtggggtttttagtgtcggaggttttggggtgggggttaggtttcgtatttgtagaggagtttagtgggttgtacgtttttttttatttttatcggttttgttttttggagtgtgttagagtttaggggagaatgtagtttattaggagtatttggattttttgttcgttatatggtgtggttattatttagtttttatttttgttttgtttttaagggtagaaaattttagggttttttgttatcgattgtttagttattttaagttttttggtagttgttttttttggagtagaaagtgtttttattttagttattcgtagattgtttggttagatgcggggataggttggaatgagggaggcgtttttatttttttgttattttttttttacgttattttcgtttttatcgggttgtaggtgttgttgatgcgttgggatttgattgaggataaaaaggaaggagagatgatttttatttttttattttttagttttgaaaaggtttaagtaagtgagtttggtggaggagttgagggagggagttatggaaggtgttagaaggaaggttggcgggggtacgtgtgggtcgtggtttgggttggttagagtggcgtgagttgttcggcgtttgttttgtttaagtgattagggaagtgtgtgtgtgtttatgtgtatgcgtgttcgtttgtttgtttagtgtttgggtttggtttaagattgggttgtagttatattaatgtttagttagttatttttgttatttattttttttggtttaggttttgttgattttttgagttggggaggtgggaggttaggcgagtttgattttgttgatttattcgtgtttgggtttttttttttagagtttatggtaacgaatttttagaaaggagagaacgggcgttaggggtgtatagtttatagttgaagagtaaggtttcgtggtagtacggttcggttttttattttttgtttttacgaggggatttatgggggttgtttttgtagggtatagatgattaaagtttttttttgttttttgttatttgttttgtttttggggagaaagaggggtttgatgagattttatttaggtgtatatattattaggtgtatttgtaggtatcgggttggttgtttgtagttaggagaaggttagcgagaaggagtgtatgagtgtgagtgtgtgtgtatggaagttggggtattgggcgtttgattttttttttatttaagagaggaaggattttttattatttttattggtgagatagtttattttgttaatttgttatgtttttgttaaaattaagattttgaaggaaatgagtggttagcgttagggtttaggttatgtggtttgtttagttttaatgttatttggtggcggggtggggtgggggtgggtagtagtattttagttttgagatgttttattttttttttttgtaattagattttgaaaaattgttcgttttattaggttttgttttttaatggttttttgttacgtgtttttcgagaaatttgtttttttgtataaatgataaagtgttgaaaatgtattttttgaaataaatgttttaaatgtagaaattta

SEQ ID NO: 6 - DNA, 221909 bp, Artificial Sequence
  chemically treated genomic DNA (Homo sapiens)
tgggtttttgtatttgaaatatttattttaggaaatatatttttaatattttgttatttatataaaaagataaatttttcgggaggtacgtagtaaaaggttattgaggaatagagtttgatgaaacgaataattttttaaagtttggttatagagaaggaaagtgaagtattttaaggttgggatgttgttgtttatttttattttatttcgttattaagtgatattgaggttgggtaggttatatggtttgggttttggcgttggttatttattttttttaaaattttggttttggtaaaaatatggtaagttggtaaagtaaattgttttattagtgggggtggtgaggggtttttttttttttgggtggggagggagttagacgtttagtgttttaatttttatgtatatatatttatatttatatattttttttcgttgatttttttttggttgtaagtagttagttcggtgtttgtagatgtatttggtgatgtgtgtatttgagtggagttttattaggtttttttttttttttaggagtaagataggtaataggaagtaggaagggattttggttatttgtgttttgtaaagatagtttttatgggttttttcgtggggatagagggtgaggggtcgggtcgtgttgttacgaaattttgttttttagttgtggattgtgtatttttgacgttcgtttttttttttttaggggttcgttattatgggttttgaggggaggggtttaggtacgggtagattaatagagttaggttcgtttggttttttatttttttagtttagagagttagtaaggtttgggttaggaagggtgagtggtaggggtggttggttgggtattaatgtaattatagtttagttttgggttaaatttagatattagatagatagacggatacgtatatatatggatatatatatatttttttggttatttgggtagggtaggcgtcgggtagtttacgttattttgattagtttaagttacggtttatacgtgttttcgttaattttttttttggtattttttatggtttttttttttagtttttttattagatttatttgtttagatttttttaaaattgggggatgagggggtaggggttattttttttttttttttatttttaattagattttagcgtattagtagtatttgtagttcggtgggggcgggggtggcgtgagagggggatggtagggagatgaagacgttttttttattttagtttgttttcgtatttggttaagtagtttgcggatggttgagataaaggtattttttgttttaggaggggtagttgttagggggtttggagtggttgggtagtcggtggtaggggattttggagttttttatttttaggagtagggtaggggtaggggttgagtgatggttatattatgtggcgggtagggggtttaggtgtttttggtgggttgtatttttttttgggttttgatatattttaggggatagggtcgatggggatggaggggagcgtgtagtttattgggtttttttgtaagtgcgaggtttggtttttattttaaggttttcggtattgagaattttatatagacggatgatttgtatatcgaagttgtttttttgagttttcggggagttaggtttggggatagagggttatgttaatttagtgggtgtttttatttttgtttgtggttttagtgtagtttttttataatttcggggaggtcgcggttttattattgatttattcggagggaggtttttttttttgttttttggtagtatgtcgaaggggtggggaacgatgataaatggagaaaattatataaaataaaatggggtggtgggagggtttggggggggacggaaatgatttgggggtaggatttcgggggtgggtagggtggcgtttatattttcggggtttttggtttttttttttttatgtcgttggttatggcgttgttgttttcgttgaggcgttttatacggtacgtttcgaagtggatgttgttggtgatgtttttgatgttttgtatgtgcgttttgtgggggtggggggcgggcgggttagtgaggtgggcgtagcggggtgggggtagcggggtaggggttttgttcggtttgtttcggatttaggttcgtttgtttttatttttattttttatttcgattgtttggttttttatggggttttttaggtttattatgttggattagatttggtatacgttttgggggaagggttagtttttttggtaagtttagattcggttagaatatatatattttagtgtatgtgtttttttttgggtttattttatggttttgggtttagggtttagggatagtgtatagatttagagggatagggttggagtattgttgttttaggtcggtgtttagggtgttggtagggtggaagtagtgggtgattatcggtttttaggattatggtttgtggtaggtaggtggtttggggtaaagggttgggttgtttttgtttttaggaaaaaaaagttttgggttcggatttttatttttttgtagtttaggaggaataatttggagggaggttggaaagtttagtatttttataatggtagaacggttttcggaatttttttatttttgttttcgttaatttggaggtttttttttttgataatatttttattatttatgttagttgtttgttgaggaagaatttgtttaggttagggtttatattttagggattatttatttagtattttttttattagggttttttttttttgtttggatttaagggaaataaggagaagttttagttaggtgaaaggggtaggggttagaggttagtgggatcggagttggagacgttttacgttgtcggtagggtttgtatatgaggttttattgggtttttagtggttatcgggtagttttaacgggttagattatagtggattaaagtttagtttttttatttagttaatttcgtaggggttgaaaaggatttttattgtttgttttattttttagtgggtttttttttttagaagatgggtttttaagattttttcgagggtagggtaggtaggtggtagggggtatttattttgtttagggtttcggttttatatttattgtttttattcgttgtagggtttttttaggggtgaagtcgttagttttatttaagtattttgttttttatttgatgagaaggtttcgtaggtaggtaaatttatagtgtgtggtgtttttaattaggagaggagataggaggggttttaatgttttagtggagaaattttgttcggattttatttttttttttttgtttagaaatgttggtgttaaaagtagagtttgagggtagttttatgggtaggagggtaggggaattatttgttttgtagttgagtataggatatttggtattgtttttagtttgggggatattggagtgattagtattagtttttgtttttggatagtttagtttttgttttttagaaagtttttggttaatgggagatggtatagtgattaggttaaataggagtatggaaggaagttatagtggagaagttagggtagtgggttttcgtattattggggtgattagggagagtaggacgttttagtaggggtttgaagataggtagggggttgggttgttgggaatgggatgaagtaggaatcggagttgggattttaaagaaaatttgtggtttatagggtgttatttttacggttttatttattttgtgtgcgtttagagtatatatatatagggatatatataggggttacgtattgtggacgattatttataagtttaagaattagtaatgttaaatattgtttagggatatgtgtattttatataatatatataagtttaagttcgggatagtggttattttttagggagattgggtaggagattacgggtatttataagtgttttcgggttcgagttggtggttattttagagtggttattttattgttgtgtttcgtaatttttatatgaatacgcggtgtttggtatgtgtaattgttatataatagaaggttttttaataaggagggtagtgaacggtattattggaggtggggagtcgggtagggaaggtaaataaagatattcggtgtttttttatgtgatgaatttcgtttttatatatttgtaagtgttttttgtgatttttttgttatttttattattttacgaaaatggggcgtagacgttgggtattacggtttacgtttgtaattttagtattttgggaggttgaggtgggtggattacgaggttaggagttcgagattagtttggttaatatgatgaaatttcgtttttgttaaaaatataaaaattagttaggtttggtattaggcgtttgtaattttagttatttaggaggttgaggtaggagaattattggaatttaggaggtggaggttgtggtgagttaagattacgttacggtattttagtttgggtaaaagagtgaaatttcgttttaaaaaaaaaaaaaaagaaaaagaaaaagaaaagaaaagaaaatgaggtatagagaacgtaagaattgtgtttgttttagttttatagtgtataaggttggagcgggatgtagaatttatatatttggttttaggttgttttatcgtagagttatatggtttttttttaagttaaaaatgtttagtttttatttggtaggttagtaggtagggtcggggtttttattttgtttagtttttaagtgtttttagtgttatgtcggttgtttttgtttaggtttttttgttacggttttgtgtagggcggtgtttatattagaattttttgtagattgattagtagtatttttatttaatattgacgggtagcgagagtcggtaggaagaatggggtttttaggttggagttggagtgtgtgatcgttattttttggttcgggtaagttatttttatttttttagtttttttatttataaaatgtggataataacgttattcgttttttagggatatgaggattaaatgagtttatggcgtgattaattatattttatatttttattgataatatttggggtggtttttaaggatgggaaagatattttaagatgttgtttattaagtgggaggtaagaataaggtatagtttttattagttcgggtgttaggttagttatgaatttatggggtttttgatataaaaatttagtagtgttgaaggtatatttttagggtttttatataagattgttggaaagtgggttttattattttataattgttttgataggttttagatttttttttagttggagttagtggtgtttaataacgtataggttagagaggtgcggggattttttttttgtgtattttttgatagtttttgttatcggttatttgcggtatttaaggttggttattagggtgtagtagaggtacgtttatagtaaagtcgtcggttcgttttaggtttatttatttttaatttttttaaatttgttttttataaaaagttttttaaatagtaagaattttttgggtagagaggaagagaggaattgtaggtagaggggttaaggggaggtaagttagtttgatattataggcggatattggaaaatatttaggttgtatttagttgggtagttttcgtagggtgggttcggtaggggtggtggtaggggaggagtgtagataggggaaaggttcgtgtgtttttttatatttttttttaggtatgaatttttatttcgagggagtttggtgtagggttggagttgtagattttagagtcgtttttcgttttgggttttttggtaggttttttgtttatagtatttttttaattttgtaaggagggtgggtgcggggagtttcggatatgaaacgagataatttatgtttagttagtggtataggagtgtttgatgttttttggtaattgttattatgattatttttttagagtaatagttttttaaaaagttttgtggtttttgggatagttttttaatttattaaaattttggtatattgtatttattttgtggatgatgaaaattgaggttttggaagattaagagatttgtgttttttgttttattgggttttttagttaagtgtttttttagaataaagtggttttttttgttgtatttttttttgtattttttttttttttattttaatgagaaatgaagggatagagagaggaaggggaaggaaacgttcgggtttatttttttcggggtgttatcgttaggagtgggttgaattgtggttttttaggggtttttatttatttaaagatatggttaaggtttaggttttggaatttatgattgtgattttatttggaaaacgtttttttttatagatttattaaggatttttaaatgggattatttatttagggtaggttttaagtttaaagataggtatttttgtttaaagataagaaggaaagagggtaggttcggtggtttatttttgtaattttagtattttgggaggttaagtaaggtgggtagattatttgaggttaggagtttaagattagtttggttaatatggcgaaattttgtttttattaaaaatataaaaattaagttaggtgggtggtacgtgattgtaattttagatattcgggaggttgaggtaggagaattatttgaatttaggaggtagaggttgtagtgagttgagattgtaatattgtattttagtttgggtgatagaacgagatttcgttttaaataaaaaaaaaaaaaaaaaaaaaggaagaggagggacgggatagagatatagggaagaaggttttgtgataatggggtagagattagagtatgtgatgtttttataatataattaggaatgttaggcgttattagaaggaggaaggtatggatgaggttggtttttagggttttagaaggaaatagtttttgatttcggatttttggtttttggaattgtgaaaatacgtttgtgttgttttaagttttttcgtttgtgttaattggttataatagttatttaagagattaaggtgtgagggttttaggaattttagtagggtaaggggtcgagggtttatttggtttatagagttatagtttattttttttttaggtttagagaggttgggcgatttgtttagggttatataggtgtttatgaaagagtttgtattaggatttagaatttggcggtttttattttagtttttgtttttttgaatttttttttgttcggggggaggtttggggtggaggtatttgtataggttatttgtttttttatttttttaagggttgaatggggataaggagatttttttttttgggtggggtaaggtagtggatgaggttttacgagtttttggtttaggcgtggtttataggttttgggttagtagaagagattgtttttttatttgtttggagtttcggcgtttgcggcgagtattttcgatggtattttatttggttttttttttaaggatttttttgtcgttgatttggtattcgtggttattgtttattatagtaaatgggattattttttggggaacgggtagacggtattggttatatatgtgcgggaaggtaatttttttttttgggttttcgggaggagttgttttgagtttggggttttttaaaaacgagagttttagtttgatagtattgggtatagatatttgggtttagtgttttttggttttaagaatataattttatggtttaaggttttttaaatttttaatttattttttagtaggaattgggggttttttgggaataatattttagtggatttatttattcggaatttttcgtttattagtcggtttttcgagtttttattaaattttttttgggggtatacgtcgatgtcgttggatagtaggtttgcggtgatttgggataaggagggagagagatgggtttatttttgtggtaagttttatttatttattggtgtttgttatatgatttttatattgtgtgttgttttaggttcgggtttaagggtaggttttggggggttgtgatattaattatttttaatttttgtgttttttggagggaagaggggtagttgtaggtgtatttgttgttttgagcgacgttgtaattttttaggggtttaaggttatcgttttgagtattttttatttttttttttttgtttattatagttttaagaaagtatttagggttatcgagatttttttttttgaaattttttttaaaaaattttcgttatagtttttagttttagtaggggtttcgtttgtagtaattttttagttttttgttagtagttcgatatgggtacgtgtaatagaaatattttagtgagcggttgttcgtttgtttaggtatagattatagttcgtgtgtagttttcggtagatatatttattttgtgtggattgtttttttttgtatatgttgggaaggtttttgatatttggttttaggacggagtaggttataggttttatttatatttatcgaggtagatgtggtgtcgtagtttaggtatttcggttttattttgaaaggtattttatgtggttttgatgtgttgttttgttaggaggaagagtttagggttgtttttttgtttggatgtttttttttattttatagtaggggttttagacggtggcggagaagaaggtggtagagattattttttttgaaatttttttttttttttttttttttgagatggagtttcgttttgttatttaggttggagtgtagtggtttaatttcggtttattgaagttttcgtttttcgggtttaagagatttttttgttttagttttttaagtagttgggattataggcgttcgttattatgttcgattaatatttttgtatttttagtagagatggggttttattatgttggttttaaatttttgattttaagtgatttgttcgtttcggttttttaaagtgttgggattataggcgtgagttattatatttggtttagttttttttttatttaataaaaattaggtagggcgaggtgaggtggtttatgtttgtaattttagtattttgggaggttgaggtaggaggattttttgagtttaagggttagagattagtttgggtaatatggtaaaatttcgtttttattaaaaatataaaaattagttagatatggtggtgtgcgtttgtaattttagttattcggggattgagtttgggaggtggaggttgtagtgagttatgattgtgttattatattgtaattttggtaattgagttagatttttttttaaaaaaaaaaagggggggtataaaataaggtgggttatgtcgtacggtttttgttcggttttattttttggaagagagatttattatttgtttggtttaggttttttttaaaattttttttagagattttgttggagaattggtatttttataaagttgtttttgagatatgggggagttggagaggttattttagggacggtttttagtagttatttgggttagggattattaggttagttattcgttggggagagtgattagcggttcggtttttttgatagtgtgatttttttagacggggtggtttttgttaggtttgtagcgtttttaggttgtatagaagggttggggtaagtagagatggaattttattcgttgtttgaagtggatttttttttttagggtgagtgtgttcgttttggcgatgatagggacgatgttgattattttgtttaggcgttttataaattcgatgtttaggggtttgaggttgaagtagagggatgtgcgtgaggtttatttgggggagcggggtagtgggggggtatttatttttaagtaggtgtcgatatttttaggtgttggttcggggtttacgggggtttttgttggtaaggatagggtttcgggtcgagtcggttacgttgtgagtgtggggtagaggaaggatacgggtgtgttttagatataggtgatattattgtataggttaggcgggttagggttagttttaagtattttcgtttatgagttttggggttttaattatatttttatatgtttatatagaagggttgtcgttggtttagtagtcgttttgttgtggggttttggttgggaggggagaggtaagagaaatagaagttagtattagtgtgcggtgtttttgtattaggcgggttgtttttttgtattaggcgggttgttttttttgtttgtttggttttagtgagtttggggtttgatgtggggaaagttgtgggtggtaggggttggtagggttttggaattggggtattattttttttagttttggagtcgagttttttttatagtgagaataaatcggttatatatatggttggggagaagttcgtttcgggtagaagtttaagtagagatggttaaggttcgtttttgttttatgggattggacgttttgggcgggattaggtaatatgtttagttggagttttagttaaagggttagtgttggggagtggtagaagtgttatagatcgttcgttcgttttcggtttgtttagttggtattaggagaggtttttgttttttgttattagttttagttgaggtaaagtttggagtagttggaatagttgttataggatcgtaggtgagtcgttttgtttgggagggtagatgtttagtttaggagaggtttatggatagcgggttggttttttgtttttgatttttgttggtttatagaggatgatgttagagggtgggttcgaaaatttcggtttgggtttttttatagattttgggtgaggttcgttgtttattagttaggtttttttttgtatttggtgtttatagagtatggtttttttaaatttttgggtttttttcgtttagggaagtatatttgggatagtaggtgcgaaggattttttttatttatttatgtagataagttatttacggttgtttttattagttatttttgttggtttttggtttttttttttttagttttggtttagggtgagttataggtgtttggtagggggtgtatagggagttgaggatagagggttcgtgaggttatgaagagtttatttgttagggtatatgtagtttttcgtttttgttgatttttaggggcgacgttaggtgcggatagagtcggcgggaggaaagggtttttattaatattaatagtagtttcgtttagttttggaaggggttagtattgatttttgtgtttttcgtttaagaacgtattaaattttttaaggggttttatgaggtagggttcggatgagaaggttagttatcgttacgggtgtttggttgggggtttttattttatttgttagagtttggtttgagaaggtaggatatagattattaggttttagaatagtttagggtttgtttgatttttagttttttaagacgtagttgaaggatgggggttgggtaggatatttgtataggggttagtgtgaggttttggaggtgtagatatggtatatttttaattttatagttggcggttatggtttttgatttagtttttttgtatttagtagtagggtagatagtatcgttttgtagttttaggggatagagggaatttagggtattcggtatgaggacgtcgatattgtagggacgtacgagtggtcggtggcggggatgaagtagaggtagtagtggacgcgggtgttcgggatgcgttttttgcggttgatgttgatttttttttgtaggtatttttcgtattggttattgatgaattttatgatgggttgttagttgcgtgggggatggggacgagttagtaggtatatgagatgttttttttaagtaggtcgtgtatttttaggatttagagtttaatattttattttttaatgaaatgtatgttttgggaggtttggtttgttgagcggagatgttatagttttattttcggttttttaaattagttttttcgggttggttttaggtgatgagttggggatagtaagattttttaggtaattttgttttggtttagaatttttaggtttttgagacgtgcggttttggtagtatgttaggttttaggaggtgggttttgtattttcgcgggtcgggaaatttttagggttgattttgggtggggtttagggagttttgaagttttcgttagtgtttttttttttggaggggttttattagttttcgttgttgatgtggttttcgaattttggtgtgttaattattgttagttttattcggacgtttttttttttaatatttgtatagagttacggacgtagagttagaggggagacggaagatttttatagatattttatatttgattgatttcggggtaattttaggtaggtagcgatgataattaaggagatatcgggaaattaatggttttttttagttaatttcggtataggtcggtgacggtttttttgggagttttttgtttgttagatttttggtggaaaatttagttgtttgtggggagtttagtgtgacggggtttataggggttcgggatattgatttattatagttagagttttaatatgtttaatatgttggggatggtgggtatagcgagttttcgttttggggatttgggattgtttgattcgggtatttttatatcgtattagtgttttaggaaggtatgggtattttatatttttagtttatttttagttattgatcgtgtgtgatggttttgatttttaatttttgtgttttaggaaggtaggggcgttttgtatttttagtttattttcggttattgattgtgtgtgatggttttgattttttattttgtgttttaggaaggtagaggagttttgtatttttagttcgtttttggttattgattgtgtgtgatggttttgatttttaatttttgtgttttaggaaggtaggggcgttttgtatttttagtttattttcggttattgatcgtgcgtgatggatttgatttcgatggttttggggatgcgtttttttgaggtgggttgtatcgattttcggttgattttggatttgaagagggtgttgattaaggtggatttatttaagtcgttttgttttggggagaggatgggaggtcggttaggggttttttcggagagattagtagggtttgtatatggggttttttttatttaggtacgaggttttttagtttgagatttagtagtgtttgggttatttttcggtaatatttttgttaagtagttttcgaggattttattttcgagtcgggtgtttagtgattgtgtaaatttatatagtcgggttttgatgttagtataatttaggttatagtttttttttgagaggtgagtcgggtttgggagagtcggtattttttgtgttttttgtgttttttggataggaggttttttggtggtttagattttggataggatagaggtcgggttggcggaggagtttagggttgtttagggtgtattaggtggtcgggatttttgtagtttattagggtggttgtaattaaagtttaggtgtttaaattgtttttttttgatcggttagggtttgggtaagttatttgattttatcgtgttttagttttttgatttgtaaaatgggataaatagtttttttttcgtggagttggtgtgagtattaggtaggtttacgtatgttttatggggtttgtggggttatgtgttagggggcgttggtttgtagggtggtgttattcgagggatagtgatcgtgtgtgtagatagttagtttataggtgattgagataaacgaggatgaggaagtagtatttatatgtaatataatatatataatttatatatattttatatatatattttataatatatatattttatatgtataatttataatatatatataatttattttaaatatattttttatatatattttatatataatttttataatatatataaataaattatatataatacgcgcgcgcgtgcgcgtatatatatatatatatatatatatatatatatatttttttagattcggagttttattgttttattttgtatagagttgttttgggttacgttagtaatatattaaaaaaaatattttaggttaggtgtggtggtttatgtttgtagttttagtattttgggaggttgaggtaggaggattgtttgagtttaggagtttaagattagtttgggtaatatagagagattttgtttttatattaaaatgtaaatattggttaggtgtagtggcgagtatttatagttttagttacgtaggaggttgaagtaggagaattgtttaagtttaggagtgcgaggttgtagtgagttaggattattgttattttagagtgatagagattttgttttttaaaaaaataaaaatcggttaggcgagatggtttacgtttgtaattttagtattttgggaggttgaggagggtggattatttgaggttaggagttcgagattagtttggttaatatggtgaaattttgtttttattaaaaaatataaaaattagttaggtatggtggtatatgtttgaggtacgagaattatttgaatttaggatgtggaggttgtagtgagttaagattatgttattgtattttagtttgggtaataatgagattttgttttaaaaaaatataatataaaaaatattttaaattatattgatgttttgattttgataatatttttttaggaaaagtgtgggtttttgggaggatagaggttggtgttgggaatttttggtttgaattgtttagtagtttaaggacggatatttttcgtttatttttttttgtttattaggtttgtgttttggttaattttaggttaggagttatgttaatgttttagttacgatattttagatttaggagatgttaattgggatattgtaaggtgtatttttttattattgttatttttattattattattattattattattatttttattattattattatttttattagtattattattataatattattattgttattattattattttattattttcgttattattattattttcgttatttttattattattattattgttattataattattagtattagtattattattaattatattattattattattttattattattattattaatattattattatttttattattattattattattattaatattattatttttattaatattattattatttatattattattataattattattattataattattattattattttttttattattattataattattattattattattattattataattattattatttatattattattattatttttattataattattattattatttatattattattattatttatattattataattattattattatttttttattattattattattattattattataattattattattattttttttattattattataattattattattattttttttattattattataattattattattattttttttattattataattattagtattatttttattattattattataattattattattattattattattattattattattataattataattattataattattattatttatattattattattataattattatcgttattattattataattattattattatttatattattattattataattattattattatttatattattattattataattattattattattattataattattattattatttatattattattattataattattattattatttatattattattattataattattattattatttttattataattattattattatttttattattattattattattattattataattattattattataattattattattataattattattattattattattattattattattattataattattattattattattattataattattattattattattattattattattattattataattattattattattattattattattattattatttatattattattattattttattattgttattattattattattattatttttattatttttatgattattattattattatttttattattattattattattattataattattattatttatattattattattattttattattattattattattattattattatttttattatttttattagtattattattttattattattatcgttattattatttttattatttttattattataattattattattattgttgtaaattttcgaataattataatttgttggggattttgttcggggtttagttcgtttgattttattttatgggatgattttattttatggacgaggaagttaaggtttatagaggaggagtttaggggaagatatataagttttatttcgttgagttaggataaagttgggatttttttcggggtttgtggatttttaaataggtgtttttttattttgtttgtatttttgtaggtgggtatagttgttatgggagggaggagggaggagagtagagttgttttacgttttgttttttattcggtatttttgggagggagtgattttgtggggaattaggattattgttttttttagggttgaaagggcgaagaggtttagataggtgaagtggttttttgcgtattatttttagagggtaaggttgttatagtggtagttacggaaggcgagggttgttgggttgtttttttttttttttggggttaaagtttcggaagaaggtttgtgttatggttgggacgtagaggtttttaggttttttttattttgtttttggttagggagtagggtagttttttcgtagtttatagagatgagttttagtttggttattgtttttgggttttttttttttttttttttttagttattttttcgggaggtagttttgaatttttagggtataagtacgttttttataataggtagaatagggtgggggtcgtaggaggggattttatattttcgtttttttttgaagtaggttgttagtttttaggtagttgtgagtatagtagggttatgagtagtcgggttttatgaggttataggaagtagagaggatattaagattttaggggagttagggtttagattagtgtagaagaggaaagaaaggtgtcgggttggtaggtgtgggtttgcgtttatagagttgggtaggaaggacgtgtacggttggtaaaggttagagaaataggttcggtttgagaggtgtttagatattttgtagaaatttcgtaagtttatttttgtttagggtgtgatttggcgggggtatttttttagatttttttttggatttcgtggagtgggtagaatatagttttgggagttaaaacggtggttgcggttttttgttttgtgagttaaggaattttggtagttttttttgagtttcgtttttgtttggaaaacgggacgttttttttatagggtttttgtgaggtttgaatgggatttggggggttttggaaataataggcggtttattgtagattttagtttggtttttttattttgtttaggtcgtgttgatcgacgatttttcgtggtgatttttagtttttcggggttattagggggtgtggaagttacgaggttttaattttagggtagagttgaagttgagttgttgggaagtttttggtcggggtgcggtggggtgcggtggggagtttggagggttaggttggagtaatagtgaggggatagttgttatagaattttttgtataagttgacgttattgtttagaggtagcgattatttattaggatttgttttaggtcggtttgggttttttaaagttattttaggggttttggatgtgtaggataggtttttttgaggagtcgttggaggttgtgggttttttttaggcgtatgtatgtatacgtaatgttattggtaattcgtttttgaggttagggttgttgttttattttatagaagggaagattaagtttaaaggtttgtgggtcgttttgggggttgaggttggttttcggtattggttgagtggtatgtaaggtgaggatttatcgattattatgatgttgaattcgaagttttgttttatggtttttcggcgtatttgttttaggatggagttaatttttacgtagtcgaagtttatcggggttttttcgtttcgtgatgtaggcgtttgtttgagttcggtatttttgggggtgtcggttatgtcgttaacgtagttgggagtcgttttagtggttggggaaggaatagtagaggagttagagcggaataggggtttatatataggcgtttgttaggtggttgttatatttatttttggatggggaaattgaggtattgaggtttagaaaggttaagcgatttgtttaggcgatttttgagaattttttcgggtggatgtttttggtcgtggtgttttttaaaaagttgttattttgtagttacgttgtttttttagtaaagttttatttttagatttttaaggttaggtttttttatttttttttttaggagttgtgttaagttgggggttttttgcgttttaaggtagggttgattttgaatttttgttttcgtattttggagggttgtttagataagggtggagggtgttttttttttttggttttttatattgtttcgggttatttaggtggatttggtttttttttttatttttatttagataagttgtatcgtttgttgttatttaaaggttttagaagtcgatttacgagttaagatataggagggatggttttgtaagaaacggggatagaattagcgtgtgttttcgttttttatatttttatggatggttttgtaagaaagggggatagaattagcgtcggtttttatggagttgtgtgtttaattttatagaacgagttagtagttttgggagaaggaaaagtgttgggtgtagggcgggtgtttggatgtagagttgtttttgggtttatggaggaggggggtttttgtattatatttgtttttttttggattgatttaggcggtcgttttgtgtgtttggttagcgtttacgggttgtatatttataggttaagattaagttttatttttgggtatgtggggtacgtggagttgaatttttcgaaattattaaagttttttttgtttgtaggttttttcgatggttttgtttttggttgttgttaagatattatatacgggttagaggtttggggttgggggcggacgttcggaagacgtttgttgaggatttaggtgtttttatatagtggggttttaggggtatttaggatggggttggtttttattagggttggttggtatacgggttaggttttagtatattttagattcgttatatttattggtgtatgcgtatgtaggtgtagataattcgttggttatagaggtggtgtttttgttagtttttataggttggagttgtttttggtggtttttagtttttacgtaggttgggcggttgttgttttgtgttttcgtttttgtttgggtttatttaggttttgttttgtttgcggggagatttttgttttattttgttttttagggaggatttggttttaggtattttgcgttaagatagggattatacggtacgtttttaggtagggtttttttcgttagtttttcgggaggggagtggtttttttttgggatcggtgggtatttagtaggggtagttataggggagtggagtcggcgtgggagttagggttatagtacgggaggttgtagggggtttatttttcgtgataggtaagtgagtagtttttttagataggaggtagttttttcggtttacgtttattttttattttgtttagaaggtgggaggtaggtttttaggttaggaggggtagtgggagattttagtttaattgtttttttatttgcggggtaagaatcgaatttaggaaatgtttattgagttttttggttgtagtttgtatttttagtcgatttaagttatttttttcggtttattttattggagcggttagagggtgtcggagggaggttttttaggtttgaggtattagaggtgagagaggaaaagattttggaagttagaaattgggggttggtttatttttataggtattttttcgtttttttagtttttatagggtataggaatttttattttatggaattgggggaataaaggaataatataattttttgttgggaaatgttaagggggggtttatatatttttattgttgagagtaatatttataggcggatttggaggttagggtttttttttttgtgtttttacgtggtttttatttaggttacgtagtttggaagtttttagggttttgtttttgtttttgttttttttttagaaatatttttttttgggtttttaggatttttaaataaataaagatatagttttgtatttggttatggattatgtggttttggggtcgttttttgaagttagatatggggttttgttttgcggggtagtagtttagtttttatttacgtgatcgaaaatcgtttttatttgtttgtgggtttgagagttattttgtttgggattgggattagtttttattcgtttttatttttttttagtattttttaattttttttagtaggatttggggggaggcgttgttttttgaatttttttttttcgtttttaacgtttttggagtttagagcgagggaggggtcggtttagttgtagttgggtttttttataggtattagtatttattgtagaaatttaaattaaattaaatattttgtttattaggggtttcgtttgagaaataataatataacgtagtcgagttttatttttgttattgacgtagggtagtggtttgttttttgtataggtgagagttatttttgtaatttttttttcgagaggcggttttgtaggtttcggttggttcgtaggtaggtacgtacgtagagagtaatgtaagagttcgtttcgtttttttatttggttaggtgagttttggggtttgtttttaggatttttaagtgggaaaagtagagatttttatatttagagatatttttattttggttttaggatattatggtgtttagatagttggaaataatggtaaagattatttattttattgtttgtgattacgatatcgttcgaggtttgcgttgtttagcgtggtagttattggttacgtgatttttttttttaattgttataacgtttgttacggttattattttgaagtgtgtagtttagtggtgttaagtatattcgtattgttgtgtaataaatttttagaatttttttattttgtaaaataaattgtttttattaaataattttttagttttattttttaagtttttggtaatttttattttgttgtttttttgaatttgattattttacggatttggtataagtggaattttataggattgtttttttgtgattaaattattttatttagcgtaatattcgaaaggtttatttttgttgttgtaggtattttaattttttttttacggttgagttaaattttttgtatgttttattttttttttttttttttttagatagagttttgtttttgttgtttaggttggagtgtaatggcgcgatttcggtttatcgaaatttttgtttttttaggtttaagtaatttttttgttttagttttttaagtagttgggattataggtattcgttattatgttcggttaattttgttttagtagagacggggtttttttatgttggttaggttggttttgaatttgtgattttagatgatttattcgtttcggttttttaaagtgttgagattataggcgtgagttattacgttcggtttgtttcgtttttgatttttttatttatttgatcgcgggtattcgggttgtttttattcgttggttattgtgaatagagtcgttatgaatgtgggtgtataaatatttttagttttttaagatgttgtgtatttttttgaatttatatttagaagtggaattatgggatgttacggtggttttagttttcgttttttgaggaattgttatagtgtgtttataagtgatttttgagtatttgatattgagttagtttaattgaggaacggaatttttatttttatttaaatttaaatagttatattttataaatggtaattatattggatggtatagaattttagtttaatttattttttattaatggggaaattgaggtttatagagtgatttttttttttgaaatgttattgtaagtggttaggttagtataagatttttattgaatttggtaattttgaaattttatatttttgtttgtatgatatgcggttaatatttgtgattttttttaaagatcgtgggttttagtaagacggtagttgtttcgttgagatttttatcgtatttttaggtttcgttttgttacgaatacggttgtgtaaggatttgtttgggtttttgttttttattttttcgggtatttagattaattattagtagtatttacgtcgatttttagaaaggttttgatttggatagtaattgatacgttattttatagttaaagtaaaatgtagagtttttttttcggtttcgtagttgggagttagaggttttaggttttggtttttggtttaaagtgattttttgtaagtttttttagtttggtaaataggttatgtattttttgattttttttttagtttttgttttgcgagtttttgggtgttcgaggttgtggtttatttagtgatatttttagtttttagtgtagttcgtgagtagtataatatattcggttttagaaataattaatatattcgttaatagatgcgtggagaaatttaacgtgttgagttaatatagcggattattttttagttataaaaaggtacgagcgtgcgttaatatagatgaattttgaaaatattttaattgtaagaaattaagtataaaaagttatattttttagggttttagttatatgtttagaataagtatatttgtagggataaagcgtagattggtgatttttaggggttgggggagggggagtgattgtgtatcgaggatggcgtttttttttggggtgaggaaaacgttttggaattagaggtgatgtttatagaaggttgtgaaaaaatgttatttaattgtgttttttgaatcggcggatggtgtaatatggaaattatatttttatgaggacgggagaggaagggaaagaagggaaggagggagggggaaggaaatagggaaggaaggaaaaaagggaggggaggagggagggacggaagaagggaaagaaggtagttatttttagtggagttggattgaagagtttaatgggtgtagtaaattattatggtatttgtatttttatgtaataaatttgtacgttttgtatatgtattttagaatgtaaagtaaaataaaataaagagtttagtgttttttataagtgtttaggagttagttttatagtttagaggatagttgaggtttagaggttaatatttaggtttgaggtttttaagttggtgtcgttagattatgttttagataaatttttttatttttttgtagtaagggtgtttttagggtggtagttaggcggaggtgttaggtggcgggagattttgatagtttttttgtaggtttttattttgaatttaggttttatgttagggtttttttgttatttattggcgttggtggtagtaggttatcggtttcgtgatggggattgtttttaaatttgtttattttggggattagttttttttttttcgtaggcgtttattgggttattttttttttagagttgtaggtgggtttaaggtagggatgaaagggttgtaatttacgtagttttgagttagtattttttgggaatatttgtatttagtgataaatttttattttaattttaggatttgtcgaggatgagggaattagattgttgtttgtggttgggacgggggttgtaggatatttggttgggaggtagtgtttagagaggaggtagttattggatatgatatattttaggggtatttatatttattatagttttagggttgattttggtttatttggtttggtgtcgagagagggtttgatatagtaggtttgtaaagtttgatttggaaattaagatttaggggtcgtttttttttgtttatttttttttgtgtgttatgttgtttggtttacgttttagaaatgtttatataagttttattagttttgttggttaaatgtagagatggtgtcgttggggtaagggattttgagttatcgtttaatgttatttttagttttaggggagtgatagtcgggtttgtattttaggataaagtgtttagggttaagttaatgttatttttttgttttttttaaatttaatttatatttggtttttagagtacggatcgaaatggttatatttttatatattttgtttgttattgttaatggtggttaagtagaatgtaaggttattttttttttgtttacggaggtttgtgaagttattgattaggttacggtaggggagtcggtggtatttattatattttgttagttttttaggttcgtgtttaggagaaagttgtcggtatttatagttggtgtttttgtttcggcgaagatttttttgtttttatttatttcggtttagcgtgggtttagtagtttttttattttgtttcgtaataatgtatattggagtagtttttagttgttttttttttgtaggtttttttgaatttagattttggggttagtatttttgcggtagttttacggttatttgtaggtttttttagaaatttgagtttatgggggtattttaggttttataaattaatagatgttttttgttttttataaaggggttttttaaagttgagtgagtttttgatgtaggtaatgttaggaggatagtgttcggttagggttgtttttttttttttttttatttttttgggtgtttgtaaagttttttagatttttgttgaattttggggaagttttgtttcgtaattagggtttgtttttttcgtttttatatagagtttgttttttgcgtttagatagtttttttacgatggtaattgaataatgatgtgtgcggtttttttttattataatttttttatatagggtttgtgaagttagatattttatttattacgtttattttagttcggttttttttagagtagcgtagggtttacggtaagtttcggtaaaaagtttggtgaatgaatgaataaatgaagaaataaagtttattatagtagtcgaggtttattgggggttttttgtgttaggcgttattttaatttttttttttagagagtgggttttattaatgttggttaggttggttttaaatttttggttttaagcgatttttttattttggttttttaaagtgttgggattatagatataagttattgtatcgagttttaggtgttattttaaacgttgtttaggagttattataattgatggattattatataattttataaggtagttattgttattgttttattttatagataaggaaatcgagatcgagagggtttttgttaattatgagggtcgtaaagcgagtaagcggtagagttaggatttgaagttaggtaggtgagttttaggttgttgattttttttttaggttaggttttcgggaattatggaaaggttggagaagtatggggtttttgtagttaggatttagaaggtgtagttgcggtgtaggtagtttagtattgaggttttggtttttagttttttttttagttgtttttttttagggagttggaggtagagttttgaattgttaggagaagattttattcgttagttagggaaagttgttagggttttttttagggtttagagttattttaggtttattaaagtatattagtattttagtttttataattttttttgtaagaaagatgatggtattagttattgggtcgggttgggggttttagattttaggggtttttttaggtttgtttatggtttttttaggatatagatgtttatttgagaaattttagtgtattaggggttttatagttaaaataaagaggtagagttgttttggggtttttgttaaagtttttaggtagatttatttagtagatattaaaatgtttattttttatttgaaaattttatttttaggaggtcgttttaggttgggttgataaaatttatagagattttaatgatgattttttattttaggtatgagtgagtgggtggagggagaagttattgttaattattaatagtttaggaaatgtaggtaaaggaaagagaatggtaaggcgatagggttggaaattagatatacgtgtagaggtgagtagattttagagaaagaattgttttggaataagatggtaaagaaattatagataataatggtagacgatgattttggggttttagtggattaggattataatattgatttatttgataagtatttattgagtgtttattttatagtaataaaaagatgatattataggtttgagagtagttagaatgaaaatagtggtggtatatgggaatttgaagtttatttatttaaatgtttattagtcgagattttcggatagatttgaagtagtttttaatatgtaaggaatttataatttgatatagtagtataggatatgtgtgtgttataaatttttggtgaaaagtaaagattttttttagaaaagtatatattgaagatagatagatagatatatacgtattttgaacggtttattaaagaatttttaggttcgtggattttagttaaaaaaataatttggtattttgggaggtcgaggcgggaggatcgtttgagtttaggagtttaagattagtttgggtaacgtagcgagattttatttttataaaatgaaataaaataaaatgagaattaaaaaaaataaataaatttggtgtgatgagaatttatagaatttaatagggttattttagtattatttgtagtattttttaaatttttgattatatatataaagttttgggttttatagttagagaagagggagagtaggttaaaaataattatttaaggtggaagatgagtttgagaaataaagaggtaagaggagaagattgaggttagttgttttttatttttgagtttcggtaggaggaagtttttaagtgagaataagttgttgtttgcggagtggattttagagcgggtggatagagacgataaggaatgttatttttggggggttttgaaaataggatatttttttattttaattttgttttttattgtattgtgtttttattgatttatttaagttattataaatattttataaatgttattggggattttttgtttttttttaaagatggaaatattgaatataaatgattaaattgtgtaaatgtgtgtgggtgggggattaaggattgaatttttaaaatgtatatagtttatttaatttgttaattaattttaaattaaattatattttatattttgtatgggataggaagcgtttttttaaagtttggttaggatttgggatgtcggaaatttgagattttgttttttttttttgagatattttgaaattttgtttagaaatcgagtataatggttttggttttttagagaaagatacggatttgtaaaggtaaagagttgtattttttttcgagttggagtttttttcggtttttattatggggtttaaataaaattgtagttttatagtttttttgttggtgtttttttttttttggtgattaataaggtggaagagttaataagaattttgtgtgtttttttgtaggatttggaagggataggtggtgtgagtttgtttttatttagtttttttttttatttatttaggggtcgaggcgttttcgaggtagggggcgggggtttttatttttattgtcggttaaggtttttttagtttttttttcgttaaatttttttaagtaaattttttttttattgtggaggaaggaattttaagtagttttgtttttttgttagtacggttttaattggttttagtcggtaaagttaaatttggataaggtttaagggttttttatattattcgtcgttttttggaagaggtttttttttgtttttttatttgtaatttattatttttttagtttgagtttttttatttaggtttcgcggtttattgagatattaattttgggttagagtaagttttgatttgtaaattattattatttattttttaaagagttatttttagaatttaggttgtagggagggtaggttaaggatgaattttttgatttttggtgcggtgtgtggtggggggggttattttatattttgttttttgttgtttttttgttttgttttaggttttgaagtggatttattgtagagggagggttagggaatggttttgatgttttttttattttaaggaattttttagtaggagcggtttttattttaaagtaattttaagatttagttcgtgttagttttttagttatgtttatagtggtttgttaattagagatttttttagtttttggtaaatttgtaaatttataaagagaaagaaaagttttttcgtgggtgggtggatattggttatttgttataggttggaatttttttttattagggatgttttttaagtaggggttggggagggtagggtttagagtttttttttttttagttttttttgttattagtagatttgttagtagatatatagtagagtttagtagtgaggtaataataggggttgtgggggttggggtttcgttttttttaatttatgaaattatttgaaataataaaatttagataagggtttttggggtgtaatagggtggttttttgttaggtgttgggtagaaaaaaagtttttttttaatttttttttgttgtgtagattagttcgggttttggggatgttgtagaggttgttttatgtttaggttttttagagatagtagggggttggaggtacggtttgtttgggggtaggggataggtagggaggggtatatttttgggttatgagtaggagtttgattaaatgatttttttaggagggagaaagatatcgtatataattgtttgattatagttagaggggttggaaaggtgggggaaaggggtgaaggggttaattgttttaggtgtttttaatttatgtagtatttatttggattgataagagttgagagattggaattgtttttttttttcgtttttaggttttgttttaggagtttttttgtttaggagtttgggagttgaggaggtttggaagtagtgggtttatagtgttatcgttttgggaatttatagtgttttggatgtggttttttcggttttagttttgtaggtagtttatttggattgtatttattttttagaagagttgtttagaattttgtatgttcgaaagaaagattaattaaagaagtgaggaagttaaagagaggtttatgaaagtttatgacgtattttttaagtgtatattttagtaattttaaatgttttttgaagtaaggatggggatggatggttggataaatggatgggtgtatgggtgtgtgaatgggtgagtgggtgggtggatggatggatagatggatgaatggatgggtaggtggatgaataggtaggtgaatggatgggttggcggatgaatgagtaaatggatgaatgattggatggatgggtggatgagtagataggtggatgagtgaattggtggatgagtggatagatggatgagtggatgagtagatgagtgaatgggtggatgagtggatgggtgggtgagtggatgagtagataagtggatgggtggatgagtggatgggtagatggatgggtgagtggatgcgtggatgagtggatggacggatgagtggatggatggataagtggatgggtagatgagtggatggatagatgagaggatgggtagatggatgggtgagtggatgggtgggtgagtagatgggtggataagtggatggatagatgagtggatgggtggatgagtggatggatatatgggtggatagatgggtgagtggacggatgatgagtggatgggtggatgagtggatggttgagtggatggataaatgggtgaatgagtggatgggtagatgagtggatggatagatgagtgaatgagtggatgggtggatgagtggatggatagatgggtgaatgagtggatgggtggatgagtgaatgagtgaatgagtggataggtggatgagtggatgggtggatgagtgtatagatagatgggtggatgggtggatgagtggatgggtgggtgagtggatgggtaggtggatgagtggatggatagatgggtaaatgagtggatgggtggatgagtgaatgattgtagataggtggatgagtggatgggtgaatgagtggatagatgggttgataggtggatgagtggatgggtggatgggtgggtgcgtggatgggtgagtgagtggatgggtgggtgggtggtaagatgggtggataggtatatggagtttatttaaggagttttagaaatatatatatatttttttattttagattttttttaggaaaaagtagtgtgtatggatcgttatttggttatattttgagatagttatttttattttttttggaatatcgtttggggggatgtagtatagggtatttaagtaatttttgagtttagggtagagatattaggaagtagtaggtaggtcgtgatttcgtaggtttgttttatggtttttgttgtttgtattatggtatgaagtttagatgtatttttggatttggggttttgattagatggagttattaattttttgaagaatgaaatatataggggttatttttgttttttagttgtagggaatgacgattatttagttttttttttttttaaattttttttaggtttttgtgtatggttttgttgattttttttttgtttttggttatttttttagtttttgtcgttttttttttcgtttttatttacggagttagttttggtgttttgagagtttttttttttagttgattttatttagtttttgagtatttaatgttaataatgttattttttttgtttagatttatatttgagtgttagtttgatttatagacgtgtttttgggtttcgttgtgttaggttttttgttgggttttgggtatttgtagttattgttattgttaagttttaatatttgaaggtattttgaatttaatgatcgtgttttaggttgaattttggagtttttattttatttgttttttattttattttttatttaagtgaatagtttttttagttaatagttattgtagttagatttttaggggtcgggtttgggttttttatttttattatttcgaatttatttatttattttaaatttttattaatgttaatttaatatattttatagttattattattagttgtttttgttcgaattttttttttttaaagtattagggggcgtgtgtaaaatttattaatttgatgatttttttttatgaagtcgtgattggtttttattgtatttgggatatattagatttttgtggttttagaattttgtttattatcgacgtgttgtgtgattttgagtaagtaatttaattattttgtgttttaatgtttttatatgtgaaatgggataataatatttgttttataagaatgttggggattaaatgagatatttatttatgaagtatatagtgttgtgtttggttagtaaatgtttgaagtttttgttaataaaatatacgtttttaatttattttttagtttttatttacgtatagtttttttggttgttttttagtttttttaataaggttatttatagaggttttttttgtcgggattattttttttttatgttgtttttagaatttttatttgttttttcgggatagtttatttatattgggttttttagtttttgttttgttttgttttgttttgttttttttgagatggagttttattttgtcgtttaggttggagtgtagtggtattatttgggtttattgtaagttttgtttttcgggtttacgttatttttttgttttagttttttgagtagttgggattataggcgttcgttattacgttcggttaattttttatatttttagtagaaacggggttttatcgtgttagttaggatggtttcgattttttgatttcgtaattcgttcgtttttgttttttaaagtgttgagattataggtttgagatattacgtttagtttaggttttttagtttttatatacgtggtttttcgattgttgtttggggtttgtcgtatttattatttataaaattttatacgttcgaagtatttagtaagacgttgtgaatgagtgaatgaataaatgaatgaatggttagtttgttgttttttcgttcggtttttcgttttttttagattagtatgggggtagttacggttttcgtttatttcggtaatatcgttttttttgtgtcggtcgcgttggttagagtttttttttacggcgttttcgcggtttcggtgtgtggtcgtttgtgaatgagatttatgattttcggtttttattatttttttggagttataaagtattaaggcggaaggatggatgggttttttgggatagtcggggtgggaggtcggtttaggaaattttttttaggaaatggttagtgtgggatgaggcgttcggtgggaggggagtggagtggggatttggggtttggttgttttgtagttagggattttaatttttattttttttttcgtttattttttaattttagtgttgggtttagggtttttggggttttttttaggaatatagaagatatagtaaggattagggatataggataggtagagtttatgggtaggaggtttttagttagtatatttgagtttatgtttggttttaattagatattgagattttggttaggttattttttacgttgaggtaggggggttttttagaggttattggtttttaagtatcgcgtggaagatatgttacggagagttagtattttttgagatattagtagaaggttagacgtttcgcggtttaaggatgatttggttttagcgtttatttatttgtcgttttgtatgaaaagtttgacgtgatatggtcggttttagcggaagagtgattcgggaatcggtagagcggatttagtaattggtaaattggatttagtaattgagatattgttaggggtttggtagaagttttttaatgtattagatttagttttgatttttatagagtttagtcgagtattaaaaggtgtagaggtcgagttgagtattaggggaatattgattttagggttgatcggtgttgtgcgtgtattttatagtttatagacggtttatatttattcgatcgtatttgatttttttttgcgaggttttttttagatttttcgttttttaaagttattagttgtgttttttgaaattagagtaaagtaataaaattgtagtaatagcgtgtttttatgaacgttgtgatgttagttggttaaatgagggagtttttagggttttttatattgtttcgattttgtgtgttttttggttttggtttattttttatattttttgttttttttttttttttttttttcgaggatttagggtttggggttgatttattgtgggattttaacggtgattttttggaagaaatgttcgttttttttttttatttagtagtgatttttggttcgtttacgtttacgtagttaatataggtagtagtcggaatttggaagtttttggggtgggagtttgtttttttttaggtttttttagttcgaatttcgggaaggagttatatttatatggtaattttttttaaggttgggagggggaaggggtttggttcgggtttgattatttttttgaggttgcgtttattgggttttttaagttagttgggtttttcggttgtatttttgagggatggtaatagattatagtgtaaattgtttatcggttggttgggtagtgggtgtttagatgcgggttagggttttcgttttataggttgtgtggtggtttaaagtgggtatttttatgggtatatatttgtgttatagtttattcgtgtgtgtgtgtgtgtgtgtgtgtgtgtgtgtgtgtgtgtgtgtgtgtgtgtgatagtttagaaatatggtaatttatagtttttttaagacgttggttttgggagatttgtttatttgggggttttagtatttttagttttttttaggaaggttttgttttttttggtttgaagttggttttagggaagaatttttttagaaaaataaaagttattttttttagttttagtttagtttttttttaggggtgagttatattaaatttattttttttttttttttttatttttttttttacgttgtaattagttgtaagtggtttatttatttaggtttgttagtttattatagaaaagatattcgaattttgtattttttttttttgatttgttttgggttttaataggtaaaggaaattggaagttagtagttaggatttagttgtaggttttcggggttattttgcgtttttattttagttttatttatttttgcgttgatttaatgtttatttattttagtttatggagcgaggtttggatttaagataaaataaagggggttttggttttttggggtttatagtgttcggtgtcggcgagataattttagagtatagtatagagaaatggttgcgatacggattcgtagtatttggttggttaagtatagtaatgtatttttattaggtttgggttttttagtagatatatggtttaaaggttggttggttaaattatatgattttgtaattatttaagagaaatgaaaatatgtttatataaaaatttgtagattagtatttattgtagaattttttataatagaattatgttaaaaagtagaaataatttaaatgtttattagtagatgaagagatatatagtgtggtttatttacgatggaatattattcggttatgaaaaagaatgaagtattagtatttgttataatgtggatgagttttgaaaatattttattaagtgaaaggagttagatattaaggttatatattgtacgattttatttatataaattatttagaataggtgaatttatagagacgaaggtagatgagcggtggttaggggttgagagttcggagttgggaatggggattggttaatgggggtagggttttttttggggatgatgaaatgtgttgggattaatggcgatggttgtgtaattgtgatggttaattttttgtgttagtcgggcgtagtggtttatgtttgtaattttagtattttgggaggttgaggcgggtggattacgaggttaggagattgagattacggtgaaattttatttttattaaaaatataaaaaaaaaaattagtcgggtgtggtggtgggtatttgtagttttagttattcgggaggttgaggtaggagaatggcgtgaatttgggaggcgaagtttgtagtgagttaagatcgcgttattgtattttagtttgggcgatagagcgagatttcgttttaaaaaaaaaaaaaaaaatttttgtgttaattggattgggttatggggtatttaggtaatcggttaaatattattttgagtgtgtttgtgaaggtgtttttggatgagtttaatatttaatttttttattttttagaaagtttagtttattgttagtatttatttaattttatataaatacgttttttgaggttgaagtaaatttgattggatgttttgtgtgaaaattaaatataaaaattggttaggcgtggtggtttacgtttgtaattttagcgttttgggaagtcgatatgggttaattatttgaggttaggggttcgagattagtttggttaatttggtgaaatatcgtttttattaaaaatataaaaaattagttacgtgtggtggtaggtattttgtaattttagttaaatttaggaggttaagattggagaattatttgaatttaggaggtagaggttgtagtaagtcgagatcgtgttattgtattttagtttgggtaatagagagagttcgttttaaaaaataaaaaaattaaaaagaaaaaaaattttttaaattgtttttgtagttatttttaagtaaaataatagagttatttgagtcgtttattttggaaaaattagatttattaaatgaatttttagttaataattgattaagaataatgttaatattatttgtaggaatgttgtgttttttaggatttgatatttttagcgatcgagaattattatttttttttaaattttatttatttatttattttttgagatggaattttgttttgtcgtttaggttggaatgtaatggcgcgatttcggtttattgtaatttttgtttttcgggtttaagtaatttttcggtttcggttttttaagtagttgggattataggtgtttattattacgtttggttaatttttgtatttttagtagagatgggattttattatgttggttaggttggtttttaatttttggttttaggtgattagtttgttttagtttttttaagtgttaggattataggtatgagttattatatttagttgagaattattatttttttttaaaggaaatattattattaaaaatggaatgttataaatagaatgatgttttttgtttttaaagtcgatatattagagtgatgtgaaaataataataaaagtaagatatttttcggtaaatttattttggggtgaacgttgtagttataagtattgttggtgagtattttcggggtaaataggaaaagggtgtaattaggagtttgggtaaagtagattgtgtgttttgatgggggtgggttttattcgattagttgaaggtaatagggtttggaacgtatattttaagatatagtgttttggtatagtaaatatttttagttgaaggaatttaagaaatggtaggtttaagaagaatttattgatttgttttttttttgaagtagattataagttttttacgtaagaggtgttttttttatatttagcggaaaggaatagttttatttttagagatagaggatttgagaggggttttagtatataggttttgtcgagatttttacgggtttattgtttagtttattttttgttgttttgttatagttttttacgattttttattttttattaaatttagtataaaaacgtttaggtttaggttaggtatagtagtttatatttataattttagtattttggaaggttaaggtggttagattatttgaggttaggagttgaagaatagtttggttaatatggtaaaattttatttttattaaaaatataaaaattagtcgggtgtggtggtatacgtttgtagtcgtagttatttgggaggttgaggtatgagaatggtttgaatttaggagatagaggttgtagtgagtagagattatgttattgtattttagtttgggtaaaagataagtaaaagaaataaataaaaaaattgtttaaaataagtaataaataaatttaaaaaataagtaaaataaataaaaattgtttaggtttaggtcgggtatagtggtttatatttgtaattttagtattttgggaggttaaggtaggaggattgttcgagtttaggagtttgagattagttcgggtaatatagtgggattttgtttttataaaaaataaaaaattagttaggcggggtggtatatgtttgtagttttagttatttgggagtttgagttgggatttaagagtgggtttagagtagttttcggggtcggtagttgggttttagtttgagtttaggaagttaaggttgtagtgagtcgtgatcgggttattgttttttagtttggacgtgcgatagagtgagattttgttttaaaataaaataaaaatcgtttaggttaacggtttttttgggtttttatttttttatgaaggttcggtgttaagtaaaatttatttgaattgttatgtttgttttttgttaatttttgttagtttaatttttagggttttagttaatgaatttaaaatcgatagaaggaaagggtttttttttagattttgttttgattaggtttttgtaattttgtgataaaggtttgaaggtttgaataggaggatataaggtttgagtgagagagaatttttttcgtttaatcgtttttaatttggaatattagattttttttgttttagatttaaattgatatatgcgttttttttgggtttcgggattggaacgacgttattggtttttttgggttttgggtttttaggtggatattagagtcgtaatatgggttttttcgtgtttttagtttgttgatttattttgttaattttggtatttgttaatttttgtaatgaggtgagttaattttttataataataaatttttttatttaaatatacgtatatattttttattggttttgtttttttggatgattttaatataattattttgtgaatatagtaaaattattgaattgtagattttaaaaaggttaacgttatagtatgtgaattttatttttataaagttattatttaaatagtaataagaagttggtgagttttgtgtatttttttgtaaataagagtagggatagcgtcgtttttgttttcggatgtttttagtttttagttcgagtttaggaatattttttatgtgtttttttttttaattttgtagtttaagggtgggggcggtttttagtttggtattttttttgtagttttttattttttttttatattagttaatggatatagaggtttttttatggatttttatttttatttatttatttttatttttttgagatagagttttattttgtcgtttaggttggagtgtagtggtgtgatttcggtttattgtaattttcgttttttggatttgagtgatttttttgttttagtttttcgagtaattgggattataggtacgtgttattatatttagttaattttttgtatttttattagaggtagggtttttttatgttggttaggttggtttcgaatttttgattttaggtgatttattcgttttagttttttaaagtgttgggattagaggtgtgagttattaagtttagtttttttatagatttttaaaagggttttgggtaatatagattgggatttgttaagttattaaatgatttttttaaataaagaaggaagttataaatttttatttaaaaggagtgggggatggtaatagaaatatagttagttagaagtcggaagggttttatttaatttatttttaaggtttttgggtagaagggataagggaaaatttgttttttaaatattttattcggtattttatttttcggatgtaagatgtagttgtgtatagcggtagtagtgaggattttggtttggtaggtttttatattttttgttgagggttttaggggttagggttgtttaataggattaagaggaaatgattataggagtttttagttgttgggggtggttttcgcggttttttgggttatttttggtgaatttattttaaatttggaagaggtttaagttttttcgtttttcgtattttaaattttagttacgttagttaggagttttgggggatgagaaaaaatttaattaagttttattgtgttgggtgatataggatttagaaggagaggggtttttggattgtttaagtttaatgataattttagtagttgggtttttaagttaattagtttttttttttttagtagttttcggggagtattacggtgagttgtgaggagttagtttagtacggtatatataacgtaggggttttttcgtatttttattttataaatattagggtttttcgggggattagttttttatttttgagttattttttttttatcgtttttttaataaggaatagagaaggagtttttattgtttaattagatgtagaaattgacgtacgtatagagaggttacgtgtgatatggtttggacgttgttttttttaaattttatgttgaaatgtgatttttgatgttggaggtaaggtttggggggggtggggtttgggttatgggggtggattttttatggatggtttggtgttttttttacggttataaagttcgggagatttgattgttatagagtttgggagggttgggtgaggtggtttatatttgtaattttagtattttgggaggttaaggtgggtggattataaggttaggagtttgggattagttcgattaatatggtgaaattttatttttagtaaaaatataaaaaaattagtcgggcgcggtggtatgcgtttgtaattttagttatttaggaggttgaggttgtagtgagtcgaggattgtgttattgtattttagtttggttgatatagcgagattttattttaaaaaaaaaaagagtttgggagttttttttttcgttatgtgacgtgttagttttttttttattttttattatgaggaaaagttttttggggtttttttagaagttaagtagatgttggtattatttgtatagtttgtagaatcgtgagttaaataattttttagtttcggttattttttatagtaatttaaaatggacgaatataatgtattagtttttttttttggattttatagtgtgtttggttggggttgtgttttggggaaatggtaattgcgaggtttttatagatcgggttcgggttttaattatagtcgtattttagcgttttgatattgttgagtggatgtttaaaaagtattgttgggtgaatgtgcgagtgaatgatgaagatggaggtggttgttggtgttagggtaaggttttaggagtttggggaggtggtattaggtagtttaggttaacggttaattttggatagggttaggaggtagttagaatggttaaggatagttaagggattttaggtaagtggttttattttttttaggcgggtaggaagtaggaattagattaaggggtgttaggtggtagtggtatttagggggtttgaggagtaggtgtaggtttagtagggttggtggtgttacgtgtggggtcgatcgtggtttcgtttattgtttttattttttggacgtatgggtttatggtttttaaggtttttttttgtttttacgtttatttttttaggttttatttttagacgttaagttatttttttatttttatttttttcgttgtttttatatttgagttgattttttttttgagttttggtgaaattttagagagtttagaggtgtagtttatatttttgcgttataaggtttttgtagtttttatttttttgggatattttattttagagttgggtgtgtatttattttattggattagaaattttaggaatgtttattttgtatgtttttgttttttatttttcgttcgttatttagttcgtggttgttatgtggttgggttttggtagttatcgtagttggtaatatataattagtatttttgtgtttaggtttcgtgttgagtttttttagttttattttcgtttgtttttaaaatggtttttgatatggtaattattattatttattttttagataaaagattatagttttaggagaggaggaatggtaggtttgaggttacgtggttcgtaataggtaaatggattcggtagttattttattttcgagtggggtttttttttgtttgtagatttcgttgaggttttagagtttggagttagtgagtttttattgagtataaggatagcggcggtgtcggggttggaataaggtagggaggggttttttaaattatagttttggttgtggatttattttgggatttcgttttggttgggaattttgttttagtttattcgggatatttttttattttgagttttgtattgggttgtgtacggggtttgttgaatgagtgagggtaggagggatggtgagtagggtggaaagcgattatggtgggtaggtttttgttggaagtttgaaatatttttggcgagtaggaaaatattaggggaagaggttatagtttttagaagggttcgttggggattgttttgtagtttttttatcgggataggtagaaaatttagtttttttttagggtgagtttaggaagtttgtgggggtataggttttagttagggtggcgcgtgggtttatttaggggacgttgtcgtggtttagagttaggttaaattttatgtattttgtaaataattatttataataaataaggtttatttattttttaagaagagtaaaatattataggaggtatttttttattaattaaatacgttatagtgattttattgcgttattgagggagggtattagggtgttcggtttagagtaaattgtggttagggggacgggtatattgttaaatcggttagatttttatttttgaaaatgtgggttaaattttttttaataagttataaggaaatttagtgtgaattttatgtttttattattatcggttgttttggaagattgggaggaggggttttgttttttttttatttttggttatagggtttgaggttataatttggattgggattttaattttttttttggggaagaggtttatttagggtgtttgttaaggtttagcgtataaatacggaattcgtttaacgtttgtttcggtatttttgggttttttatattgggtttttttatttgattttttaagtagtgagagtgatgggatatggggcgtttttaggggagatttggggagatggagtaagttttttagtttaaggtgaggtttcgaggtatggtttatgtagtgatgttttttacgggaggtttgaggtatgattaggagtttggagatttagtagaggtttgggtatgggattttcggtacgtagttagagcgagggtcgaggttgtatggatgtaagtaggtgattttgtgttatcgggtgttatttgtgtcgggttttgtgtagtcgtttttattttattgagttttagggaggtgaggtaattattttaggtatatagtttcgggggtaaaggttggatttaggtgtgtttgattttagaatttaagaagataagtagaggagtttgagttttttgagatcgtagtgatggtttagtgttttaggatggttaggttggtttttgtagttttagttaatcgtgtttttttttagttatttagggttttagcgttggtttttgagatttggtattggttataggggtttatttttggttgtggatatttagtgttggttattgggatttggtattggtcgtggggatttgtttttggttgtggggatttagcgttggtttttgagatttggtattggttatggggattcgtttttggttgtgggtattcggtgttggtttttgagatttggtattggttatgggggttcgtttttggttgtgggtattcggtgttggtttttgagatttggtattggttatggaggtttgtttttggttgtgggtattcggtgttggtttttgagatttggtattggtcgtgggggtttatttttggttgtagggatttagtattgtttatggggtttgtttttggtttcggggagttagtagtgtttgtggggtttatatttggtggtggggatttggtgttggaggattttgatagtaaaattatagaggcgataggtaatagtaatttattagtatagcgtgtggtttgttttagttacggtatttttttttattttgtgtttttttattataaagtttagtgtaggtaacgaagttaagaggtggagaattcgtaggaggacgtatattatatttgtttttcgtgtggcgtttttgtattttgggtggttgagattttttgttttttttttaggttttttcgtgttaggtttgcgttgttttttttggtttcggtttttatttattcggttttttagttatagatagtagcgatttttttttttatttaatggggttattgtttagtttattattagtttttagggttggtagatgatatcggttacgggtagtgtttttttcggttttagtatataaggtataaaagatattattttgttttaagatttttttagttacgtggcgtatgggaagcggtgtcgggaattttttagggtagttttttgtttcgggggagatcgtgtttaaattttcgaggaaatgttgttttttggttttttttttgaaaaattttttaaggagattttgtgcggagcgtgtagggagaatggagatttttgtgagattgtttcgggatagttttatagaaattataaattatttggataaaagttgaaaatttgcggttatataatgttgattatttatttaaatattcgttgagtaagtatttatgacgtttgggaatttaggacgtggatcgataagatataatttttatgttcgttttagtgatagagagagagacggtattattaatttcgttcgttgggggtttttttggagggggcgtgtaggtttagggttgaatttgtttagtggatgtgttatttacgtttgcgtattttttggttttgtggtggtttttggaataaaggttgagagataaaagataaggatttgggggagggaggacgtttatgtatattttattggggatattagtaaggatgattgtttagtgattatttagtgatcgagttatttggtgtttggagtttggtatttatagagtagggcgggggtagtaggttttgtcgggggtataggtttgagaagggagtgttgttagttaggttcgacgggatagagagcgaagggttttttttttgaaggttatgtagaggtcggaggttaatgttagtaattttattaacgttagttttttgagatcgatttagagttggggttttaagagtagttttgggcgtttaggagttaagattttatagagggtgttttttatttttagtttagggaaagtgataaatttggagtgtttttgtttatggtttaattattgaatttaaatgaatgtattgataaatcgtatttagtgttatttatagggaaaagggagggaaaaaaaaaaaagaaagagagttaatcgcgtttaggtcggtcggttagggggaggatagatgggttattatttttgttattttttaggttttttgtattgattttttatttttagtaaaattaaggtttagttttttttcgtagtttcggagtcggttgggatgaagtaatttttgtaggtagattattaggtttattgtgatggttttagtagggaatttagtttaggttatagtagtttaggcgtttgtagaaggtttagatttttgggtgttaagttttttttttttgtattcgtttcggggttcggtggggtgggtagtgtgcgatttttagggttgatgaaagagaggaggaagaggttgagcggcggcgagtttgaatagttaattttgggaggggttgaggtggggaaggtttttattgttgttttataggtttcggagtaaggtttttatgattttattagtagttgggtaggtataggtttaggtgttgagtgtgttaggattttcgttgttttttgggtgggggcgagagggatttttatgggtttgtaattagattcgcgtttttttagttaattttttattaaataaatttatacgtatagcggattgggtatggtcgttattttcgggagtttttttgggaaagttttttaaggttttgttgagtttcgggaataggtttttatttgttcgggaatcgggttggtatttaataaataaattaaagttcggcgtcggaaggtagaattttgggattagagttttagttaagggttataagttttttaggaagttttttttttaaagagtggttgtgggacgttgggagtttttagggtggttagtttttaggtttttttaaagtttaggtggtatcgatgttttgtgttaaggtgagggttgtagagaggggtcggcggggaggagtttttatagtttattttggttattgattttatttttaagtattgaaataaagttttttttttatattttcggttagggagagagggcggaagttttaaatattcggggtgtatgggaaaggtttatatgtatagaagaattagataacggaagttgttggtggtggtgataggttttttaaaggggttttgagatttttgatatcggtagggaagttatatattgtattaggtttgggggtagggagaaggggtttttaaggacggggttgtttttttttgtggaagtgtttcgtattgtttgataagagtagtttggattagtcgtggtataataggaagttgggagaatacggtggtttaggaggttggttagggttggggagtggttaatttagagattttggttgtttaagtgggtttagggttttcggggtgaaagtttttgtggagtatagtggatttagtgttcggaggatagattttaggtttagataaggttttttttttttttttttgagatagagttttatttttgttgtttagattggagtgtagtagtataattttagtttattgtaatttttattttttaggtttaagtgatttttttgttttagtttttcgagtagttgttattataggtacgcgttattatgttcggattagttagtatttttagtagagatagggttttattatgttggttaggttggtttcgaatttttgattttaggtgatttgtttgttttggttttttgaagtgttgggattataggtatgagttattgcgttcggttaataaggttatttttgatatggaatgttggtttgattatagtgtttgatggtttttgtttgtaattatgttttcgttttttattaaagtagggtttttagggtagaagtcgtatttttttattttagagtgttttacgttattttttaggcgtatatagtgggttttttttatcgtagttgaattggttttattattattataatgatagtttataggggcgggggttagtgggaatataaagtggttaatgtaatagtgttttagttatttcgatatagaaatggttaggggatagaaggggtaagttgggagttagtagtaatttaggtttttagagacgagtattaaaaaaggcgagttatattataggttttttttgattatattttagtttaaaagagatttaaggagaaataagaattttatttttttaataaggattcgtatattagatgttaagtaaatattttttttttttttttgaaaaggagtttttggggttgtcgggggagttggttaaagagaatgatatttatggaaatatacgtggttttattaagttttaaggtaaggtggtaatgaatggaggaggaaaatttatagtattattagggaatggggtttttttttgttttttttttttttaacgggtttttttatgtgggatttaaattaaattttaattttattttgatttagtaggtgttgtttttatagtttcgaatagatttgttagaaaattattgtttaatttgttttcgggtggtatatttttttttaggaaaggaattataaatttattttagatgagtagagagttgttttttaaatttttgattaaaatatagtagattttatatgaaaaagtaaagagagaggggttagggatgaagtgtagtaggttggaggttgagttagtttttagagttattgggacggcgttttaggagtagatggtattgtttataaagtttttcgtttttttttgttttgaggtcggggattatttcgttggttgtatgatttagtttttggggtttttttagtatgaaaagattttttgaaagtaggttcgttagggagattttttagtttttgtttattgatatgtttttgtatggtcgatacgtagtatgttattgtagagaagtaaagtatacgtagattagtttcgttagtagtatttttttttttcgttttttttaggaacgttttgtatatatttaatatatttaggaatttagagttgcgttgtagtagtagttttttggattttagtgtcggcgtcgcggggagtttcggttacggtatttcgagtattgagattatttttagtttttagttagtcggttttcgggagtttagaggggtgataatttgagcggagtgattttagagaaagcggtggttaattcgaatttttttttggtttttttggaagttagggaaattttttgcgaaaaggaaatatgttttaagaagtttcgggtagtaggagaatttagttatttagtttagttggttaaatatttataaagagatagttgtgattatataaagttttatttttttattttgaggtcgaaaatttggttttcgcgtggagatcgagtttttcgttattttttttttggggatttcgttcggttttgtcggtttcgggtcggggtttagggatagcgtggttttcggtatcgttattatggttattagggttcgtttcgcggtcgcgttatttgagagttttcgagttagtggtgtaaggttgggaagaataaaggagtaggatttattttagtagcggaacgtcgggttgcgttggacgcgtcgagagtcgcggttcgtttatcgggttatatggtttagagtcgagtagaggattaaaggggttttgtggtcgcggaataaggagttttttagagcgcggggtagaggtagggagggatttcgattgtttgggaagggaggttcggtggggaattgttttaagggggtagggcgaggggagtaggaggagggggtaggtagagataggggcgtttagcggtaggttcggcgtagaagtaatttgaaggtacgggagggacgttaaggagttgttatacgttaaaggaaagtgatagggtttttgggaagagtgagggggagttgttaggaagaagagaggggaagaggtttttagggatttttggttatgtcgtttttgtttttgtttttgtgtttgttagaggcggtgttcgtgaggagttttttttttttagttaggttttgaaattgatttggatattttttttttttgtgttttgtttgatatttttgttttttaggtgtttttttatttatttgtttagatatcgttatagttgggtttttagggagtatggttagttattttagaaagttatttagatttgtagttagggttggaatatagttatttgggtttgttttttttattttaggtgtttgttggttgggattatggaagggagaaggagtaggagaggaggggtaggggatgggggcgtagtttattttgagtttttttttcgagagtttttggatttagatttgatttagtttttgtttttttagtttttttagtttttgggggatttggttagtgagttagtttttttttttttttttttttgtaggtttgggatgtgttgggatttagaggggtataagtaagggggtttttagaggagggagttgatattataggggttgggtttggacgttgggatttgttagatttattttagtgttacgatttttgaatttaagtgagttatttttagtaggggcgtggttatttttatattaggagagagcgtttgggagtgggttcgtttcgagggtttgttgggggttgggagggatttatttaaatggaaagaagtttttggtgatattttttgagggttaggggttgaattttggaagttacgtttttaggtagtttttacgggattttatgttgagtgttgattgggttttatatatttttattttttttatttcgtatttttatacgtggttgggggtgattgaagtttcggggtattcgttatattggttaaataggttagttacgtttagcggttttttagttagtagttattggtatttgattcgtcgttttttattttttatggttaattttttttttaaggttttttggttttacggttttttttatttttatagtgaacggtcgtggggagttgttgttattggttttcgggcgttaggttagagtcgggggagtgtttgggagaagattgtatgttcggagtttttgtttttatttgaatgggagggaggttggtggtagattagagatttgggttttgagttaaatattgaaatttaaggttttgggtttgttatttaatatttgtggaatttgattttttttatttataaaatgggtattattaatattagtcgttaaaattatagtaagatatatacgtttaggttaggaagtgcggttatttagaaaatatagttttttttttttttaagaagttaatttttttagtattgggagtgagaagagtttgttttttttattgtttgtagtttagtttagggtatttttattattggtttttaaagggtagttttagaaatcgttgataaaggatgttagaaggaatttttttttggttaggtgttagggttaatagaaagtttcgaggatgtagtttttattacgtttttgtttcgtgggttttttttttttcgtgggtagaattttttttttttggttttttttttcgaatttttttttttttgtttttggttttaatttgttttttagttttttggttttttaggttttttttagggtttaagattttgtttttttttaagtttagttttttttttttttttgtttttggatttttgagttgggaggttagtattttgggtgttttgttgaggtggtcgttttttttgtagtggttttttttgttgttattaaatgagggtttttagagtatagagaaggtattttcggtttggggttgtattttttatataaagtttttgttttttagtattttttaaagttttttatcgtttagtatatatttagtatttaggtagagtagttttagagttttttcggttggttttcggtttaattttttagtagaaacggtatatgggttatagacgtaattttatattttttagtatttataataaaaaatgtaagaataagttaggtatagtggtttacgtttgttatattagtattttgggaggttgaggtgggtagattatttgaggttaggagtttaaaattagtttggttaatatggtaaaattttgtttttattaaaaatataaaaattagttaggtatggtagtagttatttgtaattttagttatttgggaggttgaggtaggagaatcgtttaaatttgggaggtaaaggttgtagtgagtcgagatcgtgttattgtattttagtttgggtaatagtgtgagattttatatttaaaaaaaaaaagaaaagaaaagaaaaaggaaattattaaaaaatgtaagaataggtgatattaattttaatattatttatttaatagagtttaaaatattattaatttaatatgtaattaatgtaaaaatgatagatatttgatattttttttttttttttttgttaggattttgaaatttagagtgtattttatatatacggtatttttttatttggaattattatattttaggtgtttaaatggtttcgtgtagttagtggttattatgttggatagtgtagttcggagagttttaatttttttttttttttttggttgtcggggaatagagttttgttttgttatttaggttggagcgtaatggcgtgattttggtttattgtaattttcgttttttgagtttaagtaattttttcgttttagttttttaagtagttgggattataggcgtatattattatgttcggcggttattttttgtatttttagtagagatggggttttattatgttggttaggttggttttaaattatagattttaattgattcgttcgttttagttttttgaagtgttgagattatacgcgtgagttattacgtttattttcggatagttttaatttgattttaggataatattaggttattagagagttgttgatttggattatattatgatttgaattttttagattattttcggtattatgtttataagttatatttagaggataataggatatagtttggtgaaatatatagcggtattttttataagatattggtgaggttatagattttattattagtgttattcgtttggggatattttatttttagaaaatgtagagttttttttaagaaatgaatgtggttaggtgtgttggtttatatttgttattttagtattttgggaggttaaggcgagtatattgtttgaggttaggagtttaagattagtttgattaatatggtgaaatttagttattattaaaaatataaaaattcgttaggcgtggtagtgtgtgtttgtagttttagttatttaggaggttgaggtaggagaatcgtttgaattcgggaggaggaggttgcggtgagttgagattacgttattgtattttagtttgggcgatagagcgagatttcgttttaaaaaataaataaaaaaagaaatgaatgttttaggtatacgttaagtattttttagacgattttaaagatattaattattgtgattgacgacgatttttttttttttttgggtgtgtttgttttgtttttttagtttataggtgtttaggatttaaaggtagttcgttataggttatgggatttggttggtttaaaagggagagtgaggttattggaatttttttaggagtgagtttgaagtttggaatgttttttggtggagggttttgaagttaggaggcgatgtagacgtgggggttgagatattatttggggttatttgtaaagagggatatttaggtagtgattttaaggaaagagtaaggggaggagagggcggtatatttacgtttttttaatttttgttcgttcggaggtttacgtattttatacgtcggttttttcgtatggatatttttttaataagtaatttatcgtgtttatgtttatttattttaaagttatatagaattgtatttattaaaaatgaatttatggagatagaaagtattttggtggttgttaagggttggagagggcgaatggggagtgagttttttatggatacggggtttttttttggggtgatgaaaaagttttggcgttagatagtgttgatggttgtacgatattgtgaatgtatttagtgttattaatggtaaattttatgttttgtgtattttagtataataaaaaaatatatatttaaagtaatagaatttaacgtgtttttttttttttttgagttagtttgtttttttgttttatattttaaaattagaagggttttgagatatattataggtttttagggtaggttgaataattttttttttttaaattgtgttattttatgtggtaatagggattttgtagatgtaattgaagatgttgagatgaagagattatttaggtgggttttaaattataagcgttttttaagagggaggtaggttaggtgtgatggtttatggttgtaattttagtattttgggaggttgaggtaggtagattatttgaggttaggagtttaagattagtttggttaatatggtaaaattttgtttttattaaaaatataaaaattagttaggtgtagtagtatatgtttgtaattttagttattcgggaagttgaggtaggagaatcgtttgaatttaggaggcggaggttgtagtgagttaagattgtgttattgtattttagtttgggtgatttcgttttaaaaaaaaaaaagaggaaggtagagggagatttgattgtagagaaggaggaggttgtaggaggatggaggtagaggttggagggatgtagtcgtaagttaaggaattttagtagagttttttatttaaagttggaagaggtaggaatggattttgttaatattttgattttagttcggtgagattgatcggtttttgatttttagtattgtaaaggaaggagtttttgttgttttaagttattgagtttgtgataagtagttatagcggtaataggaagcgaatgtagtttttagtttattttttcgtttatagtaatataggcgtttttttgtgtagaattttgttaggtagttagtgagcgggataggattttttttcgtttttattcggggttttgtgttggattttttaaggttgttgtttttgagatagtgaattttttatatttatagagatttattttaaagttgagaaagtgttttttttaaggggcgttagaaagaaggttttaaggtgtttttgttatatgtttatttgtttgtgggtaatatttatagttttttttcgtgatttatttaatagaagggttataggggagggagtattattggttagtttattttatagtaaggttttattttggaagttataggggatagttgggatttttatttttaatttagttaattgggagaagagtttagaatagttttggaggttgatatttgttaggaagtgtggtgatatttacgtgttgttgaaatatatagtaatatagtagtagagaggaggggatgtggttttatagttttttttttatttatttagtacgtacgtatatatatatatacgtgcgtgtatatatgtattaatttttagtttttaggttttgtattttgtttttgttaagtttttcggttattattaagttaggttgtgagtatagagtttagtttttttgttaatttttttttaatttattttgggtaatattttaatgggatgtagtagatgttttttattaaatgttaagagtaatatttttttttattttttgtgagttggcggtcgcgtttttgtatgggggtgcggaggaaagggttggggagtaggaatgtggttttgagggttggtatgtatttgtagttgtgacgtttcgaggtagtttatatttttatttatagattaattttgagaaggggttgggagtatttatagtttttgttatttttgggttggtaggttggggaaattttgagtagttcgagtgaaggtcgtttttaggtaggtatggtgggatagaggggtttttgtatattttttgtgaggtagcgtagttgttgggttgttttagtatatttgggtgatatgttttttttttggtttttttttatttggtttgggagaacgtttaggatgttttaattttaaaaataagtaaattttttttttttgatttatttatttttttaaattgtgaattttttttttgtttgaatagtttaattttttaaagtaggtttatattacggtttttagttttttatcgtttatttattttttagttcgagttatttggtgttcgttcgttttattattaatttagtttttgaaaaaatttttatggttagtatttagttttattttatttgatttcgagggtagtgtttgatacgtattagttggttttttttttttttttttttttttcgtattttttagtgttggggtttagatagtttttaagggttttttcgttttttgatttagttttttggagtgattatattttcgttttagttttttagtttagttgtttttttatattttgttttaggttttttttttggaatattgtttgtttttagagatttaagtttttattttttatattttttttttcgatttttagtttttttattaaagttttattggttgttttttttcggtgttttaaattagtttttttttgtttagattttataaggttagtttttattttatgattgtttttttggattattgggattattttttattaatatttattttttatttcgtttttttttgtttatgtagggttttgttggaggatttttttcgttttattatttttttttttaaatagttttttaggtttttttgttaaagttgaaattttttttttgtattcgaggatttttgtaatttggttaatttatttttaagtttgaatttttatttttgtttaaggagtttacgttttttagttaggttttattgtttcgtaaattttatttaaaattttttttggtaaatgttattatttttaggaagtttttttgatattttttattatatgtgatttttatttttagagttagattttgatttggagattttgatttttatttatttttgttttttttgagttttttaggttgtaggttttagtttatgtttgtgggtttttgtagtaggagggtttatttttatttttttaagaagtgttcgttttatttttcgttaagttgtaattttttataagtaggtatttttaatatgtttttttatttttttttttttttttttttttttttgagacggagtttggttttgttgtttaggttggagtgtagtggcgcgattttagtttattgtaatttttattttttaggttttaagtgatttttttgttatagtttttttcgtagttgggattataagtatgcgtcgttacgttaagttaatttttttttgtatttttagtagagatagggttttattatgttggttaggttggttttaaatttttggtttgaagtgattcgtcgattttagttttttaaagtgttgggattataggcgtgagttattgtatttagtttaatatgtttttttatattttttttgaaaagttattattatattaatagtgtgttttataaattgataataatttaaaatgtgatttattattaaaagtgtgattttatttttaaataatattgttggttgtggtttgtagttagttttattattttcgtgtgatgattattttgtagattagtaatggttttaggtttatatttaatttaattattttgtttttttaattttatttttttttgagttaatattaagtgtgttttagagttgtaaatttatggttgatataaaattaggatttttaatatttaatataaagtaatcgggttttgtattggttttaatagtaattataaattacgtttgttttttgtattgggtatattgtatttagtttataatatgtgtttttgttttttttattttttttattaagatggtatataggtttaaatttgttttttgggagtaattgatttttttttggaagatgtgagtagtttttatattatatttaagaagatattgttataagattttatattttttattttagtttttaagggtttatttatttttttaaaaatttatttgttttgttataatatgtgtttttttttttttatttgtttttttaagatatagttttattttgttgtttagattggaatgtaatggtatgattttagtttattgtaattttcgtttcgtgggtttaagtaatttttttgttttagttttttaagtagttgggattataggtgtgtattattatattcggttaatttttgtatttttagtagagacggggttttattatgttggttaggttggttttgaattttcgattttaggtgatttatttgtttcggtttttcgaagtgtcgggattataggcgtgagttatcgtattcggtttataatatgtgtttttatttttttttttttttttattaagatagtatacgggttttaagtttttttttttttttttttttttttaagattagttggttgggtgtagtggtttatgtttgtaattttattattttgggaggtcgaggtaggtagattacgaggttaggagtttgagattagtttggttaatatagtgaaattttgtttttattaaaaatataaaaaattagttaggcgtggtggtgggtgtttgtaattttagttattcgggaggttgaggtaggggaatcgtttgaattcgggaggcggaggttagagtgagtcgagatcgtgttattgtattttagtttaggtaatagtgtaagattttgatttaaaaaaaataaaataagtgggaagaggggagatagtggaataaggagtttaatttgtaattgattgtgaataattaattgagataatttattattttcggattagttacgggttttattttttatttgtttttttgagttacgttttttagtgaaattttatacgtatgtgattaaatttgtttttttttttattaatttattttgagtgagtttaatttatagatttttaaatattgaatttaagagggtagaggaaatgtatttttttttcgttataaaaatattttatttttttattgtagtgtcgtttgttttatttatagtcggtaatttggatttcgttttttaaagtttatgaaagtaggatagattgtttgtaggatgttttcgttataaaaggagggttaggtttggtaggaggaaagaaacggaagtggtaaacgtttattttttgcgttagatagaggtattaggtgtttattgttttggggagtaaatatttttaaaaacggaaagaaaaatttttagttttattggggtgtaaaaagttatgatttttttcgtggttaaatggttgggtggtttgggagataagcggtagttattttgaagtttagtttatttgtttgtaaatggagggtaatgaaattatttgttgtatgggtgtttgataggttgttgtttaaattttttgtttttttttatggggttttggggaagattatatgagttagtaatataaaagtattttgaaaattatacgaagtgtttaagtatgggggcgttggttgattttaggtttgtttttataagttggtagaaaattttttagagagggttttgttttttttttcggggtaggggtcgtagtgttagatttgatggtattggtggttgtttaggttatttggtatgagattgttgttagttttagatttattttaagtttgggagggaagtaggtcggggtgggggttttgaaattttttatatttttggtagagatattagggtaggtaaaagtgttatttatggtaaattaagaagtttgtttgaattgggtttaaattagtttagtttagaatggaggttagttttattttttttttttagaattaggagtttagtatattagaggttgagaaaacgttggaatagtttttttatttgtttgtttagagatagggattttaagttatttttttttttagtttattttataaattttttgtgttagattttttttgtttaggagttataggttttatttgggagttatttagggttttaaggtttttattatttagttgtttattttattaggttaggtttgtaggtatggagattagtaggatgtggtttaaatttggttgtacgttgattagttgagtgattttgggtttattttttaatttttgggaggtaatgtttttttatttgtaaaaaggggaaagggtttagcgaggagagtgataagtaaaggagatggtatttgtgtagacggtattgtgcgggcgtttagcggatgattacgcgttatttttttgttttttttttttgtttttgtgggagcgtgggtagtagggagttaagaggaagggagtagttgttcgtttgggacgtaggtcgttttgaattggaagagaaaaaggaataagtagtagttgtttattgataagttttatgtatttgtgttttaaaattttaaaggtgtatttgaaagattttttgggtaaatttttttttatagatatacgaaagttaggtgtagtggtttacgtttgtaattttaatattttgggaggcgaaggtaggcggattatttgaagtcgggagttcgagattagtttggttaatttggtgaaattttatttttattaaaaatataaaaattcgtcgggcgtggtggtgggcgtttataattttagttatttaggaggttgaggtaggagattcgtttgaattcgagaggtggaggttgtagtgagttaagattgtgttattgtattttagtttaggtgacggagcgagattttattttaaataaaaataaatttaaaaaaaaggtatatgaaaaaggtaaaatgttatgagtgttttgtcgtaatgtgttagttataaatgggaattggaggattttttaagttatttttttttttattttttttttttttgtatatgtattaatagttttttgggtgttggtagtattaggggatttggggtgttttataggttttgtttgtttagattttagagttaaggaggagatataaaagttaaaatagggtggtaagtggaataaatggggattagatggggtaatttggtagtattcggtaaggttttttttaatgagtttttaaagaggtttagtttttaggggaaggaggcgttttaggtagcgggggtttgtagaggcgaaggtttagggcggggtttttagggaagtcgtttaggatgttcgaaaggaggggagtaatttacgagtttggtgatagggtcggttataaagtgttatgaagtattaattaggttgtttattagtttttaggatagaaagattatagtagttaaggtgtggggatttgtttatttgatttttatttagtttagaaaatgattgttttagggttataggtaatagtttaagttttgtaagttgttggttatagggtgtagttgcggtaaggtggggacgtttattagttaagttttttaggatttttgggttgtcggatatgtttgtaggacgttacgggggtaggttagattaggggtatttttatttttttttttaggttttagtttttaggttagagtgttttttggtttttggggtttttagggttgtagatagatagggagaggtttgtgttatggtgggttatttggtttttgtaggaagtggttagaggttttagtatttggatatagtagttatttttttaatttttgttaatgttgttgttgttcggggtttattttttttaatttttttttttaattagggaggaaagtattttggagtaggaattgggttatttagtttgatattttagtatgattttgtatgattttgggttagttatttaatttttttgggtttttatttttttatttgtaaattaggtagataattttttaaagttttttttagttatagaattttaagtgttaaaataaaaaaaatttataaaaaggaaatatgtgtttagtttatattttcgtttttatttgttaaaaggggaaatggatttgttacggggttttttttttttaaatagatatgggagattttttttatgattgtagaattggagtagtttagaggagtttagaattttttagagtttgagatttataggggaatttattttaattttttcgggatagaagtattgttgtttaatggtatttaatttttattattgttgtagtaaatgattatatatttgtgatgttaaataatatagattagttttatattttattttattaggttatagggaaggtgtttatagggttgcgtattttttcgaggttgtaggggagattgcgtttttttgtattttttgtttatttgtattttttggtttgtggttttttttttttttttaagttttttttattgtattttttagatggtttattgcgtttttaaaaatttttgtgatgatagcgggttcgtgtggattatttaggattatttttttattttaagattagttgattagtgattttagttggttttgttatgttatttaacgtagttttaggtgttggggattaggatgtgtttaattttgggagttattattttgttaattttaagatataggttttggagggagatgaagggtaggattataggtttaggaggttgtttgcgtgggttcgaattttggttttattattaaggaattgggggagtatattatttgtaaaatgggggtcggcggggaattagttttttggttgttagcgtagagtgaggtagtgtgtgtagtgtttggagtagtttcgtgagtatttgtttttttttcgttaaatttataagaattgatttcggtttaacggtttttttaaatttttagtttttttcggttataaggttaggagtatttttttgtagggttatttaagtttttagtttttttgaaagtttcggtttatacgatgttggaagtagatgtgtcgtgggttgtttatttatgtatggttatcggagaggttcggatgatgtcgtttttaatgggtgtatagtgtagggtagggttaggtattaataattagttatagttattagcgtaagtaaggggtttttattgttatttttggtttggggttagggagaagtttcgggaggtatttgatttttttatagggagtggggttataggagaatgtattcgaaaggggttggggggtagtagaaagttttttttagaaattttatttttggttcgtgatagatgatttttttaggttattattggggtttatttgggtttttgtagtatggagtttggttattttagaaggatgattgggtaggttagggttattggcgatggtgacggtaggtttttttgaggtttttttattagaagtattaggaggttagagtagtcgataagtttttatttggtttttgaggggtagaaggttttgagtagttttttgatttttcgaggtttttttattttattgagagattttcgagagtattgagagttattttttggttttttcgtgagagagttggttatataaaggtagttatatatttagtaagatgaatttataatttttgagtttaggtttatttcggtttttttatagggagtttttgggggcgtggggtgggggtgtagaagggaggggtcggtgttttatttttgggaattaggttatgagttttggatttaggttaaattatagaggttttatttttttttaggttttttgttttttaattatttttgtatagggtatttttttttttttcgtagggttttattggggtggggtgaggaggagttatagaattatagtagttgttatacgggggtgttaaggtagggatgttgatgttaatcgaatgggtacgggaaggtagagtaggaggtcggcgttttgggtttggttaggttgtgtgattttagggaatttattttatttttttcggtttttagttttttttattgtaaatcgagggagtgaggttaggtgatttgtataatcgcgtgaatttgtgttttgtattttttatttattattttaaataatgtttttaaattttagttttttaatgtttcggtatttttttgtttgagaaatatttacggttgttttttatgttgtgttttaaatataggtattttggtttttttttgggtgtttttattagggttagaatgggtagtttattttgtaggaatttttaaggatttttagttatttttaggatgggggttggttgttcggaagcggtttttgtttattttcgtcgtagtttttattacgaggttagtgtagtaaaataggaggtgtaggtggtcggggttaggggttaggttattttttttagcggggtaggagaggggcgagaaaagttggatattgattattttaggttgagggtttgcgtggaggagggggtttatggtaaaggaagtgggaggatgggaaggagtttttgttggatatttttatttcgttggttttagtttcgttttcgttttatttgcggggagaaagtgaggttttttgttttgttaaattttagtaatgaattttatatttattttattttttgtttattggaaattttttttttattttttggattcgttttgaatagttgggttgtagaagtcggtggaatgaaatatgtagggtggtttagaggggattgtgtcgaatagcgttgtgttttcgtttatttttttttttgaagataaggtttttttgtttttgttttttttttgggaaagttggagagggggttgaggaaatgggatttattattaattttttcgtgtacgttggtttttagtaggtatttttatattttttaattaggttcgtagggtggaaaggtagtcgtcgagtttaatttaatttttatttagtcgtggaagttagtgtggatggtaaagtatttatgtataaatatatatacgaggttgaggttaagagaatacgcgtttagtttttttttggttttttagtaacgtttttatgttttagttttgttttaagttttaaacggtgtaaggtttttttaggtggaggaatggaagtttttaagaagttcgtgttttagggattatatagaggtagggtttaggagtaaaggtttttagatttcgtagtgcggcgttggtaagtttgcgttgttgtatttatattgttttgggatgaaggcgatatgttgattttttttaggtggttgtaggatagttaggaggaggtgagatgttagttaaaggtagttatagataatagtattacggattattagaaacgttattttcgtgttaaagcgttcgttttttttagttgttttattttgtgttaatattttttgggagtgatatgtgtgagattgggttgtgttgatgagtgattattggtatttttagattatattaaggaggggttattttgttgttaattaggtgtagggtaggcggtattggggtacgacgattcgttcggtatggttgttttatttttttttttgtttgagtataggttggtaggtttagaggagaggaggaaatagagttattatggggggcgtgtttaggggtgagttattttaagaagttatagaattagggtatgggagatattgtttagttttgttattaatttgtcgtgcgaagttggttaagttattgtatttttttgggttttaggttttgtaattagagggttggtcgaagaggtaaatgatagtggttagggatgggggtattgaagttagatttttcgtattcggattttttttttgttatgtttagagggaggtttgggtaggttatttaatatttttgggttgtgggttttttatcggtgaaatgggaataataatagaattaattttatagtgttgttgggaggattaaaggggatatttattttaggtaaagagtttttaagatagttcggggtttttaggaagtttttgttattattatcggatattattatttttgttacggttgttagggtttcgtttagtatcggtagtttgatgtcggtagaggaagggtgaggtttttgtttttttgtagcgttttttttttttttttttttttagttatggtaataatagttgaagtttatttttagttttagcgattggttatttttttgaattaaggattgaaggttttaggtttgttatttaaggtttaggtgtaagaggggtgagttatcggtttttgtttttattatatttaggtttttatacgtttttttaaataggtttttgttttacgtgtaagagaagatgttaatttttacgtttggggcgggggtgtttataaatgttttggacgtgagttttgacgggggttatggtgtaggttttgttagggtatttttaattataggggattatttgtagtttatagagggttttttgtaggttaatgggattttgttattttggttgttattttgtttagttatttggtaaggaaaataggttgtagatttagaggtagtacgggtttatatgttagcgagataatataataagggaaggatgtgtaggacgagggagttatggagattttatcgtagttttagttatttattagtagattttgtgcggacgtcgggtaggttattttattaatttttaggatgtttttgtaggttttgcgggtggatagggtgaacggaggtataaggagggtaagtttgataggggttggggttgggtttggagttagaattttagttagttttgttatcgtattttagggtatttttcgtagatagtaggttaaagtaaggttgtttagattaaaggggaaggggttttgttttttttattaagggttttttggagattttaatatagatttttagtttatagatattaaatttagggtttttgagaagtgagaaatgtgaaaaacgtatagaatagttgtagtttagcgtttttaatacgttagatttatataggtatatatagcgtttttgtagaggttagaaagttttgtgttgggaagtttttcgatcgggggaggttttatagtaagtttttttttttgtttatttattaacgggcggaaggttttaattaggattatatgggaagggttagcgggaggggtagagagggaaaatgaataggtaatattaagtgtttggggcggggggcgtaggggatatttaggaggggagggtaggggtgtattttttatttaatttatagggaacgggggttcgggaggtgtaggagaaggtttcggtatttttatttttttttttttgtagatttatttatagtttgtttacgggtagttagatttagttataggttagacgttcgttttagttttatttttttggtttattgaaagtaagttaggatagtgagggggacgatgttgttattttcggtatggttatgttgggtttcggggtgggtgggaacgtggttggggcgttattttttttggtcgttataggtataaaagttttttcgtgttttagtgttatatgtgggttttttttttgttgttttaataggacggatatttaagtagattttgttggtcggggggggttttcgtatttagttttattttgatttagcgaattttttttttgttttttggggtaggagttattaggtcgggttttaggtaatggttagtgaaggggttgtatggaggggttttttaggtttataggaagggaggttttttttttttgtaacgtggttgtagtattttgtgatcgagagggatattacggttggagatggtgggatggaggattttttatagtattttcgatgtttagaatattttattttgtataaaaaagttttaaatttttttgagggttgaagttatttagagttggggtttttgttttttaggttaaaagtattttgtcggagtagttgagagtatagcgggaggggaggggtaggagggaatagtttcgttacggcgataggggattttttgattttaagagggtttgtagatattattatttatttttagttttgaattgttttttgttaaggggttagaaatttttgggagggggattatagggggtttcgtttatgagaatagtgattgtggttaggttatagtttataagttagtaattttgtttagtcgtcgcggtggtttttttttgatggtttttagaaaaagcgttttattttttgttattagtgttttgaaatttaagaatattttttaaatagtaattgtagtaaaagttaatgttgcgtgagtgtcgtaggtattatttttagggttttatatatttttcgtttagtttttataaaaattttattttattttttttttcgttttttttttttaatagtttagaaaacgagtacggaagggttaagttggtttgaggaggggttggtggaatagtttgagggtttagtttttaagaattttatattgtaaagggaatttttgggttagggagtagggtatagtttttatttttttattttcgtttttagtattaggtttgatatagacggggtttcggttatgaataaatgaataagtgaatgagagtttgttgagggaagaaggtgatagggataagggagaaataaagtagttaatgtcgtcgtgatgatgacgatgttaacggtagtattgatatgtgggtttttgttatgttaggatcgttttaagtattttgttttatgaatatttttgttttttattatgtttcgagtggatatttttattagtttattttatagaggggaatatagttgagcgtattggttaaggttatgttgttaggaaaggttagagtttaggtagtatgtggttttttagtcgggttttggtttatacggttttataggtagttttatgaaatacgtagagagagtatgtgaggggtttttttgttgttttttatttttagttggggtttattttttgttgaaatttttttaatttgtttttaagtttcgttagttacgaaatatttttttgaatatttagtattatttttttatggttatttggttttatttttttatagggtaagttttgggcgaaaagtagaaaggatgaaaatttttgagagaggtgataacgtggtaatttttttttttttttttttttttttgagatagtattttattttcgttgtttaggttggaatgtagtggtacgattttggtttattgtaatttttatttttcgggtttaagttatttttttgttttagttttttgaggagttgggagtataggtatgtgttattatattaggttaatttttgtgtttttttgtagagatggagtttcgttatgttgtttaggttggttttaaattcgtgggtttaagtaatttgtttgttttagttttttgggattatagacgtgaattatcgtgtttggttgaggtggtttttatataaagtagagaaaattatttttagtttaaaataaattaataagtattgagtgtttatgtagaaaaagattagaaggaaacgtgaatatgttaatagtgtttgtttggaggacgtaattattattgattattttttttatattttttaatttaattattttgttataagtaggtgtgatttttaaaattataaaagataaacgttggttttttgtttgtgttttgttttttgagatagggttttattttgttatttaggagttggagtatagtggtgtggttatagtttattgtagttttaaatttttaatttaagtaatttttttatttgagttttttgaggagttgggattataggtaagcgttattatttttagtatttttgttgtttagattggtttcgaacgtttggttttaagcgatttttttatcgtagttttttaaagttgggattataggcgtgagttattacgtttagtaaagattgttttttaattaggaagatagatgttttttagtattttttgtttttttttttttttttttttttgatacggagtattgttttgttgtttaggttggagtgtagtagtatagtttcggtttattgtaatttttgtttttcgggtttaagagatttttttgttttagtttttagagtagttgggattataagcgtgtattattatatttggttaatttttgtatttttagtagagatggggtttcgttatgttgattagtttggttttgaatttttgattttaagggatttattcgttttggttttttaaagtgttgggattatatgcgtgagttattattttcggtttgttttttagtatttttaatttttgttttttggtattatttggttaagtagatgaaaagttttagtgagttgttagtcggtattaggttggggttttttttaggtagttttaagtggttaggatttggttttttttttagagttgggtttagaaattaagatcgggaatgcgtgatggttgttttgcgggtttttgttatgaggttatttttttggttttagtgatcggtcgttggttgtagggagtatgtgggtttagttagggtttgtgttaatatggttttgttttatttacggtttagtgggtttttttatttttcgttgtatgataattttaggaaaaatgttaggagggagggagtcgttgggggtgtgataggagagattttttagggatagatttgtaaaaattgttttaaagttttttttaaggatttttaaggtttttattgttttttattgataggttacggttcgggtagagaaagttggggatggagttggcggggggagggtggttagtattcgtaaggtaaggagatgagttgggagaataggggttgggagggtagttttaggttagtttttgtttttagaattattgttttttttttttggttataaagtgaggttggttagatataggtttattttataggttgggaggttgggcgtgaaagtattgtgtttgtatggggtattttatggtgaatattattagagttaatttttagggtttgttgttttatagggaagttagtgtaaggcgtttatggaatttagaagtatttaaaggatttgatagttatgagttgggaggatttagttttgtagtaggagaaagagaggtagagagataggtttcgtaatatttgttttattcgttgtgttgttttgagtatagtttatttttttgtggtttcgagttttagttttgaggtttttaagattttttgggttttcgtagtttaggatgtttatttgaaaattaggtttagttagtagggtttttttcgttagtttattattggttagtttttgtttagtattttttagtttattatttttatttgtgtaaattttatattagtattttaagtttttttttttttaggaaggagattgtttttagatgtgttttttgttttttttcgattaaagtttagaaaataggaattagttttgcgttttttttttttatcgaattgttggtttttttggatgttttttttgattttttgttaatatttttataatataattagtttttagtttttttttaaatgtaatcggcgagtacgttgtagtttaggcggacggtgatgtttttattttgtaatttgcgagagttagtatattttttagttaggtgggttgtaggagttagtcgtggcgagggtaggaggtttgcgtgttgacggtatcggtattattaaaattacggttagattaaggttacggttaacgagtttttttatttgtaattttttttttattaaggtggttttagttttagtttcggttttagttttggttttggttttaggagttgtagatatatttttaagtttttattttaggagtttggttttatatatatcggaggatacggagttggggtataaatagttaagaataggtatatttgtaattaggagtagggggcggagggttgttgagatgtttttatttttatcggttgttttttttgacggtttattatttattatatattgattgtataattagggttgtgatatgtttgttttttatattatattattaaatttttaaatttgtttttaatttatatacgatgaggtaaatttagagttaataatttgtttattagtttttgaatttatgggtggttttaatttttttttttttagtttttttgggtttatatgagtattgaggtataagggaattttattagttgggaagtgtgttttttttttgttgattttatagtttttttagtttgtgtttgaagttgttaatatttttttatttagtattgttttttgtagtttgagttgtcgttgtgtgatttagggttagtgttttaatttttttggattatatttgtaagatgaggatgtcgtcgtatagtttattttaaatggttattaagttgtttgtatagttaatatttgtcgagtttgtgatacgattagttttgttttaatttcgaatgtggtatttttatttagtttgggggtggaattgttagtttttttttttttggataaggaagttgaaaggttttagaaggtattaaggttagttgatttgttagtaggtatagtgtttatttgttatttatagtttttttttgatcgtttcgtttgtttttttagttgagattttgtgtgtatttgaatattttgttaatggttgaatttgtattagggttattgtgttagttgggtttgttaggttatcgttttcgagttttgtttaaggtagggttagtgtttatattttgtttttttgttagtgttttatttaaggttttggaaaggttttggagttagagattcggttaaattttggtaatgttttatatttgttgtgtgattatgggttagcgatttagtttttttgtgtttttcgggttgttgtgagggttataggagatgtatagagggttttgagtttggtggttggtatgttgtaaaggttagttacgtggtgtaaggatggtattgatgataataaatgaatcgaacgaaaattaggttaattgggtttggggaggggcgttggttaaatagattcgagtggattaggattttgtatatgatgagtaagcgggaatagttttaaatagtaagtcgggtaggtttaggatgatttagttttgggtgttgtttagggttttttttcggtttttttgtcggtttggtttttttttgttttagtttgattgtttttatgggttttaataagtttttgattaggattgaggtagaatagatagggtttaagattttgtaggtaggtatagagtgtggatggtaaaaggagatgttttaggttttttgtcgttttttttttttcgaaggttgataatgttaatttatagaagaagttgtttttttcggtttcggattttattttaatatagtgtatgaggtagttgtgtttaaggggtgtgattatttttgtagatggaatttatttattgtgtttagtttattgttagagttcggaggacgggggaagtgaggtggggtattttttatagtgaagggaaaatttagtttagttatttttttttgtgttgtttttggaatttattttgttatggttttattttaatttagttttttaaagttttagagagttttgtttttttttttgtattttatttcgtttatttgtgttgggttagttttttagaagtttcgttttttgttatttttagggtattaaggttggttggtgggtttagggatttttattttttgatttagttttagtggtttattttatatttatcggtatttataggtgtgttttttattttcggtttttgtataggcggttttatattttgggagtttagttttttttaaggatttacgttagagtatagggatttttgtttttgatttttttttagttttaattacgagtagtttatgttatagtaattttttagttgtttgtagttgtttgttaagttatgataatggtttttgttttttaatttaatgtttgtatatagataaatcgttatattttaagtagattagatattattttttttaggaagttttttttgattgttttagttggatagaggttttttttttttgtgtttttttaatgtttaataggtatttattgagtattcgtgatatgtaaggtatttataatataagttagtgttttttgtttttttagagggtatatgaataaataaacggtaagattttttaatatttatttatgttttatagaaagttatttataggtatgggagggttgttttaattgcgggtgatagggaggtttttttaagatggtagcgttttagtaagatttgaatgaggcggttaggaggtttagggagggattttttaggagggaataagtgaatattttttcgtgaggatgagtttttatgttttaggagtagttaggttaggggatcggtgtagtgaataggggttgaggggagtggttaggtgacgtagggttttataggtcgttttacgatgagttagcgttttaagtatagtagatatttagggaaggtttaggttggggagtgatttgaatagattttttatttaggagtttatcggggtttttgggtttacgttgttgcgttattgtatgttttcgggggttcgggggggtattttttatattattattataggtagtatttttgggggaggtgtgttgtgtaggggattcgttggttattttgtcgggtaaattataggggattgtgtaggataggcggttagtttaggagggataattatttaagtaggggttagagggtattcggattcgggaggagtgtttaattttttaggtttaggtaattagaggtggggggcggggtgttgttttttgatatgggaggtttgggggtttggttgtattttttggtgtggaggtgttgggaggtgtggaggtttttttttgaggttgggattttttggttattttgatttattgtttcgattttattttttagtttgagggtatggtttgaatttatagtcgtatatatttttttttgtatagggttttgcggggtcggtatagtagttttttttttatagattaggatgtttagttttaggagggttgggattgtttaagatcgtataattagggttagatatagttgggttaattttgtgatttttggttttacgtatagattttaagtatataggtaaaattttgttggttgggagggttggggggtagatgagcggggggtagtttttttttagttttttaatatgttaggtttttgggtgggagggggtataaagattttattttttttaagagatagagaaagaggtagtggagggtttttttttggttgaggttttaggttttgagtggtgaatgtaattttatttggaggttggaagttaggcggttttgggggtgtgcgaggttcgttagtttagttgtagttttttttatgtaagggaattttttttaggtagcgtttttatgattagagagggggttaggaagaggtgagggttgtatttagagtgatattcgggtgggttttattttggggatacggttatatttttttttcggatttttgaagtttttaggtgcgggttaagggtttttagttgtaggtaggagagggttttatagttatagatttggggagtttagtttgtaaagtttagaggttttcggaggtcgttggttcggttttttgtgtagttgggtttttttgggaggttttttttcggtatttttagtttttagttcgtacgattttttatagttgggtttatttttttaggttcgggttatatggtgtaggttagtggggttttgggggagggtagggcgttaggaatagtttcgggggtggggggattggagtagagtttattttggtcgtttgtttattttgtatgaaggacgttagatttttatatgtggttattcgatttcgtttaattatgcgtaagttttggttatttttattttattgatgggaattaaattggttaaggagaagtttagaatttgagtagagtaggggtttaagttttttaggagttttaggtattttttagttttttttttcgagtattgagtttatatatttagtgttcggatgtttatttatttgggggttcggcgatcgttagttagtatggtttataaagggtttttgtgtaataggttttatttgatttttttaaaaatttttcgaggtaggataatgttatttaatttattttatagataaagtaattgagttataaaatggtttgttaaaagatatagaggtagaaagattaatagtaaagagtttttttgtgattttgattagtaaggtttttagaaaaaagtaagggatttcgaggtttttataggaatagagttttggaggagaataagagtttagttttatgttatttttaaggggtattttgaaggttaaggtattgggtttaagtaggttggattgtgttttttgtattttttttattttttgaagtttttttttttttatttaggtgggtcgtggaggtgtttataatatataatggaatagttggtaggttattgggttttttattgagttaaggggttcgattagaggtttaaatagtggtatagaaattatgagtttcgttgtaaattagtttaggttttggagttaagtagttttgtgtttatagttagggttagtcgtttttagttgtgtggtttgaggttagttttttaatttttttgtgtttcggtgttttttttgtagtagtaataggaatcgttttttacggcgatagtgtagatatattttatgaagcgtataaagtttcgagtttagcgtttggagtacgttaggacgtagtaagtggttatttatgatttatgaaatattaataaggtgaggggtggaatgatagtttttttgcgttgtttttaaaatggaaataaatttgtttagcgtttaaagtagtagaaagtgagttaaggataggtttttagcgatatgttttggtagagtgttttttgttggttttaggtagggtttagggcgggcggttattttttagatgagtttatcgttggtatttgtttttagagtatatgtttggattttttagatttttttttttttttttttgatttttttttattttgtaatttttattttttgttatttttttatttattttttttttttatttttgtttaaaaataaataatggaggttaaatgtgttagttggttttttggaaaggtttttttgtagtaggaacgcgacgggggtagtggaggattgtttagcgtaagttacgtgattttcgcgcggagtcggggaaggggaggcgttgagatcgagggtgttaggatcgaggtattgagatggggttattggataatggttagggttagttttcgtttttattttaataggggtttttatatttaggggttatatttttaaagttttttggataagagagataaattttattatagggttagaaacgttgtttttaggtcgttatttgggtgggggtgagagatgtttcgtcggtttttaaatatttattttgtggataaaattattaaggggaatttaatgtttttatagtagtttggttaagatataggtattaggtcgggcgtagtggtttacgtttgtagttttagtattttgggaggttgaggcgggcggatcgtttgaggttaggagttcgagattagtttggttaatatggtgaaattttatttttattaaaaatataaaaattagttaggtgtggtggtgtgagtttgtagttttagttatttaggaggttgagataggagaattgtttgaattttggaggtggaggttgttatgagtggatattatattattgtattttagtttggatgatagagcgagtaagatagttttaagaaaaaaaaagatgtaggtattgttttagggtttataagtataatttgatttttgatgttggtatttaattttgatgtagattttagtaggaaaagggagacgaattagaaggttgtggggacgaggggtttatagtagtgtttattagatttgttttggtaggtataagtgttttttggaggttgttagataagtagagggtttattttagagattttggttttggagggttgggttagggtttaggaagttgtatttcggtagggaatttagagttattttgagttttattttggaagtaagagttagggggtagaatagaatcggaattaaaagtttttgtgggtttagttttatggggatgggttcggttttatggggatggatttttgtattattcgaggtgattattagttcggtttttcgggattagttttgagtgttttttggggaaagcgggatttgtagaggatggttttttaggattcgtttgattatttatttttagttcgtttttattttagtttttttgatttttattttttatttagaattttggagatttggttttggaggtttagagattagaaatgaggggagataaggggagaagtttttttttttattcgttggttacgttaatgggttgattttttaggaagttatattagttattgttattgttttggtcgtttcgtttggtttcgaggttgggtgagtaagtatttcgttttgtttgtttttttatttgagttttttgttgatgttacgagaggtttgattacgcgtttaggaggtataggatagagtttagagttgtttaagaatatataaggttgaggttcgggttttgtatttgggaagggttaggaagggttaaaggaaaattttagttgagtataatggtttatgtttggaattttagtattttggtaggttaaggtaggaggattatttaagtttaggagttggagtttagtttgggaaatatagtaagattttatttttataaaaaaaaattaaaattaaaaaattaattaggtatggtggtatatatttgtagttttagttatttggtaggttgagatgggaggattgttgagtttaggaggtcgagattatagtgagcgggatattgggttattgaattttagtttgggcgatagagagagatcgttttaaaaaaaatttttatattttatggagtttagtagaattttcggttagggtgtttcgattgtgaaatgagcgtggtagttgttaattttcgagggtgaagatttatttattagtaatttgtattttggtacggtgagaggaagtgtttggggaaagacgtcggtcgaggtagagagtttagtttaatttatcgtggaggagttattttagttttaaagagaaagattaataaattttaggtgaatggtttaaaagttatttttgtatacgtagagggtgtattttgggatatgtggatatttttttttaggataggaagtaaaattagtaggtagagacgtgagtttttttgtttttgtcggagttaatttggagtttttatttcggtttttagggaagtatagatttttatttttatcgtagttaaaagattttttgttgatttttttagtagtatttagtttagttttgtggggagaggcggtagggggaggagatagagaaagatgagtttttggtagttgtgattggggggagagaaatgcggttttaatttgtttttgtttattttatagacgggcggtgttttattttaaaatttagggtagttgagggattgaaggaagagggggatattttttaattggggtttttttttattttattttatggcgttttatataggaaagagttggaaggtttcgggtttttggtatttagttaaagttttaggtaggggtttagatattgggttgtgttattattttaggtagttcgggagttagcgacggtagagttttatttttatttcgattattgtatagtatttcgtttttaggatagtttagtagttaggttgttttagggtttaaatttagatatttaattgtgggggttttaggtaagtggttgaagttttttgcgttttgattttttaatttggaaaatgggatgatgaaagtaattgttgggtagggtaaggggtaagtgaaagttagcgtttgagagtgatgtggttaggatcgttgttgtgattatatattgagttttttttttttatttgagataagggttttattgattgttgttagaaagatttagatttagaaggattaggaaagtcgttttatttataattttagagggaaggggaggttttcgtgttagttggttgttgtaggggagagggtgggagatagatgggggatagaggagtaggggtagtaggaggaacggtcggtagggaagttcgtttgagatttaaaggattgtttattaggaggatagtttaggttttttttattgagaaagatttttttggatagttgggttgaggatttttaggttttttgggtggagtagaattagttattattgaagttatataggtttgtaagtataagtgggggattgtttaggtatttttgttttataggggttaggtattaaggttagggtggttagaggatatgacgtagtttagtaggggtttcgtagaattattagttaagaagatatatgtagaagtacgtaagtgtttcgaggaggtaaattttttgttggattgaatatggggagttgagtttttaattattgagtcgggttgttcggttcgtttttttttttttgaatagaaggtttttagatagagtagttaggtaatagtatggttaagtaggggtttgtattttagttttgttttgtagtttgattaggttgtcgtttttttaggagatacgggattggttagggtttttttaggttgttataggaataaggtagggttgtgattttttttatggtttaggtatttgggggagggattatgagttttagtttaggggatagataggaaacggatagttcgttttttttttaattacggagttggttttttttttatcgtattttttttagttatgttttttattagaagattatcgtatttaatgggtggttttgtagcgatatttagtttaatgaagttatttggtgggggttttgggggatgtagttttttgaaatatatacgggtagtgggtgagtcggaggttgcgtggggttttgttttttggggatggttaggaggtgttttaattatttgtaattcgagtttatagtgatcgggatttgttgtttttttattttagtttttttttattagtattcgttaagcgttagttagtaggtgtcggtacggtttaaggtaggtttgtagttagattagtatcgggggagggatcgggagagagatttttagagtggaagttatagttttttttttttttaggttgggtaatagattattatttttagttagttttggggaagggggaggggttagttgggtcgtaggtatagcgttggggttttttgaggtggttgttgttgattacggttttttttttttttgggttgggtaatagattattattttcggtttattttagggaagcgggaggggttagttggggtataggtatagcgtcggggtttttgcggcggttgttgttgattacgggtttgttattttttttttagttgggttgttatttcggttttgaaagcgttttttttagtttttaattcgtgtttaggaggtagtcgatattttaagcgttgttatagtaggaggttgggtttgtaagtgtgattcgtttggggaggggtagagggaaagattattttcgtttaaatagcggtttttttttttttttcgggggtttttatagggtttttagtttttttttggttaagaggtaaggagaggtaggaaagttttaggaatatcggtagagaagagatagggtaggttgttagaggaagtaggttgtagggtgtttaaggttttaggttgggttttgggaggttagggtatgggtaattaggaggtttaggtagggaaatttgtttcgtagggattttgggagataggggagaggggatatgatagtcgttttttgttgttttttggttgtggtttttaggggttttagtttagattagaagtattttatgtatcgggtttcggtttagtttggaagtacggtttatagatttatatgattatttgggtagtgatttttaaaaggtttttcgttattagttggggagttttcgaggggagggtggttttgtagagtatttggagatattaatgggtcgtgaggaaaggaggaggcgtggatatttttacggttttaagagaaaattaaggtagagttggaggttgggcgtggcggtttatatttgtaattttagtattttgggaagtcgaggtgggtagattatttgaggttaggagtttaagattagtttggttaatatggtgaaaatcggtttttgttaaaaatataaaaattagtttgttatggtgatacgcgtttgtagttttagttatttaggaggttgaggtaggagaattgtttgaatttaggaggtggagattgtagtgagttaagatggtattattgtattttagtttgggtaatagagtaaaattttattttaagaaaaaaaaagagtagagttggaggttaggcggtttttagagtttgataaggaggtcgtggggttgggttgttttttcggttatttgaggggtagggattggtttagtttgagttttagatttataagaggttgaatcggagcgggatttcgagatgaggtagggttattttgtttatatttgtgtttaggttttaatagttattttttttaggaatttagtttgatggttttttaggttgagaggttgttaaggggttgtaaggtgtcgtaacgtgtgagtcggtgggttttgatgtgtgatagttcggggtattttttttatcgttagggaataggaatgaggagttttttatttttagtgtttggtaggtaggaggtcgttattggattgtgtgtttaggtgttattagatttcgagggtttacggatacggtatatgatttttaatgattaacgtttgtgtagtaggtgttgaggtgttttaatttcgagtaaggttgggtttttggaatttttttttcggtaggaggatttgtagttgaggaatttttaagaaattttttggtagtaaataaagtatggggttggacggtggatttatgagtgtttttatatgaatgcggatatagatagaaaagacggtaaatatttgtgaataaaaggaatggtttttgcgtattgaatttttatttatcggtttttgtttggtataaagtttttaggaattttttaatagttttagttagaaacgtgtttttgtttggttatgtggaaaattttatatatattaagatatatgatgtttttggttttttttacgaatgttttatgttttttgggtttatgatttggaatttgtagatttttgttgtttttgttttagagttataaggattttggatgtaggaaatattttttatgtgtaagggttttttttttttttgttagggtttatcggtttttttttgtttataggtgttatttaaatttttgtatttgtggttttttttttttaattatttcgtgtaattcgttaatagtttttttatttttagagtttggttgttggagatatataaggtatatagaattcgtgaaatgatattgagtatttattaggtatttattgtgtgtttcgtttggtaataataagtaaaattataatgttttgggtatatgagtatatttttttatgtttatttttttagtaatttaatgagatggttttataaatggggaaattgaggatagggaggttagattggtttaaagttataggttaggaggggtagggttaaaatttaaatttagatagtttggtattaaattttagttttttatacgaaaggtattttgtaatttttcgagaaggttgggattattatttttattgtatagatgaggaaattaagatgttaaatggttagatagttttggagttaggaggtgggtttagtggtttatgggagtatatggaatggagtttatgggaggttcgaggttgggatttcgtattttattttggtttaagggatgaggtgattgggagtgttagagatattttgggattggttatttaggtgttttgtatttagttttagcgttgagtgggcgagggtggataatttgttatttagtagggttgttgttcgtatttcggtggttttttaaagtttggttaagtaaagtaagattgttttcggattagagtgatttttaagttatataagtatttagttatgtttcggaggatgtaggattgggaaggttttttttttatcgtatttttatttagtttttttatggggtagttggttttaggtatagattagacgtttttttttttgtttgttgtcggtatgtttttggttttattgttgttttagggaggggtttaagagtttttcggtttcgttatttattatatttcgtttagagggtcgggggtttagtattaacgttaagtatttagtagtaaaattacgggttggaaagagttatagtgttgttttgatttggttttattttatatcgggtgtcgtttttattagtttttttttgtttttggttttattttttaggtattataagttttgtaggtttaaagttaaatttattagtttttgattttttttagttgggattagggtgaggttttcgtttaggtgtaaaagttaaggtagtgttaaaaaatttaggaattaaataatattttgaagtaatattttaaataaattaaattttacgttgaataaattttgatagggttgtgtacgtgtagggttgggtttgttttaatttaaaattttaatatttgtttattatagagattattatgtattatttcgatattgaaaaatattgtattaaatattatttgtgttgatttttgagttttttggtgtttttttatattttgtttttgataagtgtttgatatattttgttttagtcggttttgttttttaggtgtttttttggggttgttttgtttacgtttttcgtagttattaggagttattgagttattgtatttgttttattttgttttttatgttttcgtatcgtttatttcgttatgtttttttcgtgtgttttggtcgtacgttagttttagataggagttcggtgggttgggagtttatattaatgttgttttttttcggtttcggtgtcgggtatagggtagtattggagatttttttttttttttttttttttttttttttgagatatagttttattttgttatttaggttggagtgtagtggcgtaattttggtttattgtaatttttattttttaggtttaagttttgttttttggaattaagtagatttttttgttttagtttatcgagtagttgggattataggtatacgttattatatttagttaatttttatatttttagtagagacggggttttgttatgttggttaggttggtttcgaatttttgattttaggtgatttgtttgttttaattttttaaagtgttgggattataggtgtgaggtattacgtttggtcgagattttttgaataaataaatattatcggtatggagattcgtttagggaatttgtttagattttgttattgtatttttgtttgttgcgtttagaggtaatttagggtcgttttagtcgtttttatttggttattttttggtttttatttaggtcggtttgttttattttgtgggttaagaaaacgatttagtgggtggtgattagtattttttttttaatttgaaaagaatatatttattagcggtggtagtaatttaatgttttttagttgatgaaggtaatatgtttgtttataatggaatggtttatgttatggtggaatattatttagggacgtattggtatttgttataatgtggatggattttggaaatatgatattaagtggagaagttagatataaaggttaaacgtgtaattttttgtataagaaatgtttagaatcggttaggcgtagtagtttacgtttgtaattttagaattttgggaggttaaggtaggaggattatttgagtttaggagtttaagattagtttgggtaatatggtgaaattttatttttataaaaaatataaaaattagtcgggtatggtggtataggtttgtagttttagttattcgggaggttatggtgggaggatggtttgagtttgggaggtggaggttgtagtgagtagagattgagttattgtattttagtttgggtgatagagtgagattttattttaaaaaaaaaaaaaaaaaaaaaaagaatttatatagataggaaggaaatatggaggaggagggtaggattgatagttaaaggttacggggtttttttttaagaaaaaaattttttaaattttttaaatttttaattttttaaaattggttgtggtgacgatggttgtattattttttgaatagattgaaaattatggaattatgtattttaaatgggtggattgggttacgcggtgatttatgtttgtaattttagtattttgggaggttgaggcgggtggattatttgaggttaggagttcgagattagttttaatatggagaaatttcgtttttattaaaaatataaaattagtcgggcgtagtggtatatgtttgtaattttagttattcgggaggttgaggtaggagaattggttgaatttaggaggcggaggttgtagttagtcgagatggcgttattgtattttagtttaggcgataagagtgaaatttcgttttaaaaaaataaataaataaataaattggtggattgtatagtagtttatttggattttaataaagttgtttaaaaaaaaatgaaaaaaagttttttttttttttaaaataaataaataaaaagaaaaaaagagagaggggaaaaaaaaaaaaaaaaagaaaatattgagtgtagtatacgtatggtaaaggtaagaattttattacggaaatttggttttattaatatattttatttttatttttattttatatataggtgtgttttggttcgtggtgttaatcgtatgtttttttggaggttgtagtttagattggttttgaaagttgttttttgggtaattttaaattttttataatttttgaagtttttggtttgttgggattatttagttttttagatttagtttcgttattatttatttaagattgtagttttggggaggggggtttttttttaagggtgtaggggttttgtggttttatttttttttagaatatatattattttgtattgtatatatgtgttttaatatggagtattttaggacgttggttatagttagttatgtttgtatatcgattgatcgatcgtgttttgttgattaattatgttaattatcgcgttgtatattgtttttattaagcgagttaaagtaattttttcggaataagttgacggattttaaataagttaaaagatatttttttaggaaaaaaatagtaatgaattttaagaagaaagaaaaatttttaaatttatagatttatggaaaaagtttaagtttttaaagtgttagatttttttaaaagtattaggtttagatggttttacgagtgaatttttgaaaagttttaatagagagattattatgttgttgtttaaaatgttttagaaggtagagggtaaaagaaatgtatttaaattgtttttgttaagttagtataatgtagatattaaaattgataaaaatagtatatatatatatatatatatatatatatatatacgttttattcgttttagattaagttcgttgttgtgtatttaagtaatattatttatttttatttcgttgttgaaattaaaatatattttaatggatttatgattttaatatgtaaaaatgaaattatagaagtattagaagaaaacgtgggtgaaatttttttttataattttagaacgtaggagatttttaaataggatgtgaattttaaaagttaaaagggaaagtagagatttgataatattaggattaaaatgttttgtgtagaagaatattttagaaataaaattaaaagtaggtagttggggataagatattcgtatttgttgtgataaagatgtataaataatttttttttttttttagataggattttattttgttatttaggttggagtgtagtggtatgattatagtttatagtagttttaaatttttagatttaaatgatttttttatattagtttttcgagtagtcgggattataggcgtattattttatttagttaatttttgtagagatgcggttttgttatgttgtttaggttggtttcgaatttttaagtttaagtaattcgtttattttagttttttaaagtgttgggattataggtgttagttattacgtttggtttataaagaattttttttaaaaaattttaataagaaaaggatatattttttaaatgaaaagagaatatagggttttggtttataatatacgaagagataatttttttcgtttgatcgagatgtataaaataaaatattaattggagagtatttggtttttagttaggggtaaggggtataggatttttttgttggattattattgtatagggtttagtagatagttgagtaggtcgacgaggggaggggttttaaaaaattttagtaattattttagaggttaatttaggaataaggattaattttttttttttttttttttttttgatagggagtttcgttttgttatttaggttggagtgtaatggtacgattttggtttattgtaatttttgtttgttgggtttaagtaagttttttgttttagttttttgagtaattgggattataggtataagttattatgtttagttaatttttgtatttttagtagagatggggttttattatgttggttaggttggttttgaatttttgattttaagtgattagttcgttttggttttttaaagtgttgggattataggtgtgagttattgtgtttagtagattaaaatttaaatgtatatatttttgatatagaaatttattaagagtttattttttagttatgtgtgtatatgtataagtgcgagaatatttgttgtagttttttaattatagtgggaagttggataagtttggtagggttatgggatagttgatgatataattattaaaaggaacgtgttattttgggaggtcgaggtgggcggattttaaggttaggagtttaagagtagtttggttaatatggtgaaatttcgtttttattaaaaatataaaaattagttaggtgtggtggtaagtatttgtgattttagttatttgggaggttgaggtaggagaatcgtttgaaagcggaaggcgaaaggtggaggttatagtgagttatagtgagttgagatcgtattattgtattttagtttgggttacgttttgttaaaaaaaaaaaaaaagaaaaagaaaaaggaacgtgttatatttataagtggtaatagtgttgttaaatggaaaaaataaaagttggtagtagaagtttgattttttttgtgtttttgaaaagtttatatttatatattgattttttttatataagttttgaatgattttgtaggaataaaatttaggagaatgttatatttagttgttaatatggttattttttgggagagagttggggaatgggagagaaaaatttttttttaaattttatgtgatttttattttttatttaagaatgattgggtatcgttttttttttttttttttagatgggagttttgttttgttgtttaggttggattgtattggtataattttagtttattgtaattttcgttttttgggtttaagtgatttttttgttttagttttttaagtagttgggattataggtgttcgttattacgtttcgtcgtgtattgttttttaggatgaagaaagggaaaggttatagggagaatgggagttagaatatagagtagggtttttaaatattagtttgcgggtgagagagatacggggcgatattatcggtttggaatttagggatggtatgaggtgttgtttaggggttttagataaggtttgtttgttgattaagtaagggttgtgttggtttttgtttatgtgtttgtttaatacgaattttttaggcgttttattttgttttacgaattattattgtttattttaattacgttgtataggaagaattgtgtttatttttataatgagaaaacggattagagaggaaagttattaggtagggtaggggcggtagtttaggtagtgtgagggtaaagtcggtgtttttttgttatttttttatatacgagtgggtaaggtattataggagtttatattttaatttttgcgggttattttggaaggcggtagatggaattagtgatttttagggttatttttagttttaggttttagataggggtcgtggagtggaatcgagtttgatttaggtgtgttgatggtagttatgtaattgtggataaattatttttttttttatttgtattggatgagatcgggaatttttattttgggttttttaagagttttggggttttatagagtatatttagtagtagtagtgggatggggggatagggttaggggagttttatgttttttttaattttaattagagtatttttattttaatttttttttgggtttagtgtttagagagaacgggaaggaagtttagttttggttatgggttattttagtttgttagttatagtttatattttaggagttttttttggattgaaggagatagagttatttataatatttatagaaaatttcggagaggaagtggagtttaattgaggaagcgtttttttgtagtttttagaaatgaggttataggtgagatagtgtgttagggtggattatatggtatttttttaggttgtttgttggaatttagggtttggttaggggttgtttatattttgggtttcgaggcggggagtttgagtgcgtttttttagggttgaatgtgttttttgtttatatcgtatagagtatggttgtttggtcgcggcgcgttttttcggataggttcgttattgtgtagatttttaatttcggtagttgtttcgggtttgggaggcggcgggtatagatatagttttttttttttttggtagttgttttgattttttgggataagtgttgagaggcggttttatttagtgttatgtgtttgggggtcggggttttattttggggttaggttgggtggttagggttatagagttgtagggggcggagtagagaaatcgtttttagcgtttgttttttggttttattttttttcgtagttgcgttttatttaaggtattttatagttgttcggtattcgttgtattttcggattagtttttttttttttttattattgtacggtgtttggtaggtcggcgaggggaggggttttttttttgggttttggagttaggttttgttttttggttttatttcgttttattacgaaggagatatatcgggtttggttaattttttcgtattgatttttgtttttttagtatatgcgggattttttattttagatttaggtttgagaggttttagggatagttcggagaaggagggtatttgtttttagaaggggaaagagaaagagatttaattttaaagtaaaaggggatttgggtgttttttgtaagtagtttaggaaaatgggaggaggtgggagtagcgggatttttcgagtaaggtatttcggtaggaacgttagtgttttttggatatttttagaagtagaagtatatagttttatagaaaaattttgtaggtttaggattcgaggtatgatacgatttaaatttattgttttattagatattagtgagtttttcgacgtttattaaggttttttgttttatatttggtattggacgaatttgtatattttgttttagggagtttatagtttagggataggtttagagtttatgtggggtgttttgtaaatacggggttagaagttgggttgtttatggggttttttttttttaaattatagtggttattttttttttaattttatagtttttgatttttattaggaatttttggggtttagtaggtgttttttttttgtaggttgatgttcgttttttttattttttatttaggtttagttttgattttattttttttaaagttatttttttattgttttgtgttgggtggttttagggagttttgtgttttgattaattttatatttaacgttgtattggtagttttgttgtttgtgttgagatttttttttgttttgtttttggaatatacggttcggtgcggattaagtatgcgaagagttacgtttattattattagttcgggggggtttgattttttgtttttttaacgttttatttatatgataaagatttttagattttttgggttataggaaaattattgagatatgttgttatgtttatttcgttttaattttatatttatgtttataagtggttttagaattattgtggattttttttttggtttttggggtgggtggatatatgagagtttagtttttagttatttttgtagatgtttttttgatagattaagaaattgaggttgggaggggtggaatgatagtttagaattagttgatttatggggtagagttgggatatgtttagaattgagttgggtattgggtttggttttttttttgtttttagtgagtattttaagaaggtagagaattagatttatgaacgagcgttgagtattcgttttataaggtagttttggagaaatttggttggtgtggttgaggagtcggaggggggtaattttggtggggggggttttgagttagtagttagtttttgtaggtttagtattgggtgttgtagtttagttttattttattttatttagaggtatttatgttggggggtaggaaaagagtagggatttaggagaggaggtaaggtcgtttttatttagagtttgagaggattagggatgattttaaaggatgagcgtttttttgtgggaggatagtaaggagggtgttaagtttaggggtagggttagagtttcggaaatcgagaatttattttattagtataaagtttagattttattaggttttggggcggaggagtaggtagggatgtttttgttttttgtagcgttttttttttttttttttttttttaattatttaggtgtttatatttttttttgaaatgttgattttttttagaatttttatattgaagttaatatttatttattgagttttttagtataatttttagaggagagattaggtgttttgggggtaaagttgattaggaaagtttttgtttggtttttagggacgatttatgggggttattatatttgtttataagaattataaaaaagttattttaatttattattagtggtttatttttttagtataattttatggtatatttattatgtttaagttatttatttggtattttatgggattttttttttttttttttttttttttgagatagggttttattttgttttttaggttggagtgtagtggtataattttagtttatcgtagttttaattttttatgtttaggtggtttttttattttaatttttttagtagttgggattataagcgtatgttattatgtttggttaattttttgtattttttgtaaagatagggtttttttatgttgtttaggttagttttaaatttttgggtttaagtaatttgtttgtttcggtttttaaagtgttggatttataggtatgagttattgtatttggttttttatgggattttttataaaaattaagataggttgggtacggtggtatgattttagtattttgggaggttagggaagttgaggtgggtgggttacgaggttaggagttcgagattagtttggtttatatggtgaaatttcgtttttattaaaaatataaaagttagttaggcgtggtagtttacgtttatagttttagttattcgggaggttgaggtagaagaatcgtttgaatttgggaggtagaggttgtagtaagttgagattatgttattgtattttagtttgggtgatagagagagattttattttaaaaaataaaaaataaaaaaaaaatataaaaaaaaataaagataatagttttatttttagaatttagtgggggtatgaaaggaattttgaagattatatagtaaaattttaagtatggatatcgttggtttataggtgaattttaggtttttttttatttttgtattttttgtattttaaagaaagggtattcgattattttttatgatttgaaaaattatttttatatttaaaaaaaaaagtttagtagaggaaagaaagtttatatataaattatttatattttaagttaaatacgaggtatttggattaggttttgagggatgtataggagtttattaaggtagtgatgtaaagagaagtagaggttagggtttaggaggttagggtaaaggggttgtgaggaaaggtgtgagagattaagggaagattaaagtaggagaagttgggaaggagagaggtgtgagttgagtaggagagtgaattaatcgtggaggggtttatggtgagtgagtagagaaggtttagtacgggaagagattttagtagtgttgtgttttggggaagttagtttgggagtaatttagttggggttttaggagattttgttttgtatttatagttttggggtggagataaattatagtatagatgttttttcgtaggtagaagttaaggggttgggcgtttgtttagagggtacggaattttttttatgatttttttttttatggtgttagttggatttttggtgttcgggggatagaggggtcgtagagattggttagagttgtgtatgtcggggtttagggaatttttagtttagttttatatggaggggtagaaggggatgggtttgaaggaaagatgggtaggaagttgagttggagagaattggattcgtgtttagaacggtcgtgatatagagagggaggacggagaagtaagtaggtggtgtttcggaggaagaattagtggggtttaggtttgggtttttcgagaagttatttttatcggattttaagagtatttttttattgggaaggttttgttttcgtttgtttttgtattttttttatttggatttgtttaggtttttaggattgttagtttagtttacggatttttttacgtgagttggatttttatttgtataggtttttgttcgtgggtggtcgggtttgggatgttgatggtttttttttatgtttcggttttaacgtgtatattttattttatggagaaagttatcgtttttttagagcgttaggtttttggtagttttgaacgttgttgtttttacgtggtttgttttttttttttttttttggtttgatgaaattgtatttttattgttggggaagttttttggatattttttgtgttttagttattttgtttacggttcggtgagttttagaaagtagagttcgtaggttgtgtttttgggtttggttttcggtatagtttttggtataatttaggggttaaattgtgtttgtttttggaggagaatgtttttgtatatttttatggatatttttttatttgttttttagagttaggattacgtttttgtgtatttagtattagttattatcgagatttagatggttcggtgataatcgtttttttagttatattttgtttgatttagttgagtgtgaatatattaatttaggatgggggtgtattcggtacgttaaataaaggttttgtattaatagaaggtaggggaggaaatagttttttgttattttgtaaattgtttatgtttttggtttgatattatgttattagtaattattgttattgagtttgggtggttggggtagggtggttttttagagttaagtttagagagatgggagagggaatacgggattcgtatattgagggtcggaaaggattttttaaggtttattagtttttggttatttagtgtgtttcgatgttttttttgtaggaaatgtagagttttaggttttagattcgttaagataaatgtgtattttatatgtttatgaaagtatgaggagtattggtttttttttaaatttatattttttttaggttttatatttttttagtttttaagtttattgattattggagaatttttatttaaaaagaaaaattaaaaaggggttgggtggtttatgtttataattttaatattttgggaggtcgaggtaggaggtttatttgaatttaggagtttgagattagtttgggtaatttagtgagaatttgtttttataaaaaaaatttaaaaattagttaggtatggtggcgcgtaatttgtggttttaggtatttgggaggttgaggttggggaattatttgagtttagggggtagaggttgtagtaagtagtgattatattattgtacgttagtttggaggatagagtaagattttgttttaaaaaagttaaagaaaagttaaagaagatggaaagagggatttagagagatgtggaagtaatttaagggtttatcgatggaggaatagttatataatataagtgtatcgtataatagaatattatttagtttttgaaaggaaggaaattttgttttatgttatagtacgacggatgaatttttaggacgttatgttgagtgaaatgagttagatataaaatgggtagttattgtatttttttatatatataaggtttttagagtggttaaataaatttataataaagatagaaaatagaatggtggttgttagtagttgggggaggggtatggggagtttggtttaacggggacggagtttagtttgggaggatgaaaagggtatcggagatggatagcggtggtagttgcgtaatatcgtgaatgtattgaatgtcgttgaaacgtatattgtaaagtggttaaaattgtatattgtatgttgtgtattttattacggttagaaataagaagtagtagttaaattaaaaatttagattgtgttgtttgtttaatttaaagaaggtttattgagtattattgagttttgattttgtgtttagaattagatttggtttttgaggggtttttaatttagttggtattttattatagttttatggagttacgatttttgttggggttagggggtacgtttttgagaagggatttaattatgttttatagtttggtatttttaaataggttttgtgttttataggattggtattaattttttgtttgtaagttttatgttagtacggttgtgggtttgagtttttttaggacgttgttggagttttatggttttttttttttcgttagaagggtatttttaaataaaatcgtgtgtagttattatatagttttttggtttaggtatttttttttagtgttttgagaattttgttttgtaggttaaggtgttttttatgtttttttttttttgttataattattttttttgggggaggaggattagattatgggttttaatgtaagttttaggaggtatacgtttttttttttttttttaagttttcggtttttgttgggtatatttaggtagtttgtaattttttaagtaggagttattagaatgtgatagtttttttaggggttttaattttattttgttttatatttttgtatgagtttgttttggtttttgcgtggttttttattttttaagttttttaggttttttagggatatatagtagatagaggttttagtaaggtttacggtgatttataaaggaggttttttgaaatttagaaaatttttttaaatttttatttaagtttcgtttggggtattttggtatgtttttattagatagagagagttattttttttgagtttgtagatttttatttttatgtatttcggtttttttgggtttttagggtagtattttttattttatatttagtttttttttttaagattttgtggtaaagttagtaattaggttttttattattatagtatttaagatttagcgttttgcgatttatttttttggtttcggggtgtagttttagttatagggggttggggtttgggttttagtttgttttgtagttgagatataggggtaggttttgaattttttaaggtttgggttgggttgggggcggtgggcgttttagtaggtttgggtatttggatttttatttttttgggggttgcgtcggtggtaggggtagtgggtatttcggggattttggaggtagggggttttatttttcggtgggttgatttttggggtttgacgatggtgattttcgtttttcgaggggtcggttttggcgttttgtggtttaatatttcggtttttttgagttcgaatcgggacgggtcgatggtttcggcgttttttatttgtttggacgagatgttaatggatagtttagtgcgtcgggatatcggttcggtcgttttggggttcgagagttttatttttcgtagggacgttttgggggagcgttggtttagggagtttatatggcgggtcgagggttttgagttttttacgtttaggttttggaatttttgggtggagttggttatagtggttcggagtaggggagtttggatttttcggggtggggtggagttgggtgtttcgattttttcgattttaaaagatttttttaaggttgaaaaataaagagaggggatgtaattggtgaatggatggttagggaatatttcggtatgttttttgttaaggagtagtagaggaaggtaggcgatgcggcggtgagggtcgggggttttttttcgttttttatgttttagtaagcggaagggatagttttattttaggagaattattatgagttttggggtagagatgtaggttggagtgggaagatgttgttcgtcgtgttttgttatggttacggcgtaaattatatagtttttttttttagttacgtttatataggaacgttttagttttagagaagatttttatttttttttttttttttttgagatggagttttgttttgttgttttggttggagtgtagcggtatttttcgggtttaagcgatttttttattttagtttttttagtagttgggattataggtacgggttattatgtttggttaatttttgtatttttagtagagatggggttttattatgttggttagtttggtttcggatttttgattttaagcgatttattcgtttcggttttttaaagtgttgggattataggcgtgcgttatcgtgttcggttttgattttttttttgtcgcggttgtttttatttttttttatttttagttaaggtatatattgggatattattagtaaatatatttttattattagttatagcgggggatatgtttttaataataagtgatcgtaattgtaattaattagaatcgtagtaggaataaaattttattaatgatattaagggcggatattggagtttttagtgtcggcgaggcgtcgggtttatcgagtttattatatttgtagtcgtttaattttgggatgtaaagaatattagtatttttagtatagatggggaaagtggggtacggggtagatatagagttagattgtatattaggttgatattagagtttaaggttttaattatttggttgttcggtttttttagtttagtttataggaattaatttttttagttattagttttttttgtatttttttatttattattataagttcgtgtagtgatgttaattattagttttcgttttgtagttattttgtttttttattagggtttgttttttcggaggtagtggggatggtatttgggaagttgttatttttatagtttttataatcgtattttaaatgagagttagtcgtttttggttattagggttagagtagggagggatttatatggtaggtatatttattagttttttttttaggttagatttatagcgtatttttgtggagatttatagtgtttttttagtcgttttttgttttattaggttatagagttcgggttttatgggattttattattgttttttttgtttataggaaaagggatgatagttggtttttagtttttaataatagcgttttaggattaattttagtgttttttttttattcgtttttttttttttaaatgtatttaggtattggggaggggaagaggaagtttaattttttaattttggtcgttttagttgttagttttttgggtaaggtatttttgtgggcgttttttttaagttataggtattttttttttttggtggatatagacgaaattttgggttattaagtttaatttttattagaagttgggtaaggagtcgtgtggattttagagaatttttagttgttataggttttgttttagtttcgttattgttttagaggatatgggttcggcgtggttagagttgtttattttttaagagagtagaaatttggatttttatatgatattttttgatttttaaatgttggtataaagtaaaataagttttttttaaaatattgagtagtttggttgatgtggtgaaattttatttttattaaaaataaaaaattagttgggtatggtgatattcgtttatagttttagttatttaggaggttgaggtaggagaatcgtttgaattcgggaggtagaggttgtagagttgagatcgtgttattgtatttagtttgattgatagagcgagattttgtttttataaattaaaattaaaaataaaataaaatatcgtagggttaaataaaattaaatttataggttgtattcgtttatgggtttagttatgatttttagttgattacgtggtcgtagggtagtaggatattgagttttagagttaggggtgtgttaggtgtgggttttcgatatggtgtttttttgtttttttgtattttgtatgtaaattgttggttgtgttttgattttgtagaagttttagggttttaaggaaaggttgaatgtttatttttattagttagaaagtttagggtttaatgtttagaattgaatgtaatgagatgggtttattaagtttattatatttatattcgtttaaatttgggttgtaaagaatattattatcgttttcgtatagatggggaaagtgaagtacggggtagatatagagttagattgtatatcgggttgatgttagaaagtgtagagtttaatgtttgggttttcgtgcggtttttagggtttttcgcggttttttgatttgttttttgttttttgagtattgtttaaattgtttttatatggtgtgtttttgttttatgggtgttgtagagtaggggtcggtttttaggtgtttttagtattttttcgtgcggttaagttggagaatagaaattagataggagaaggttttgttttaggtttaatttaagaaaataaatgattttttttgggagattcggtgaattttttttttgggagtttttttggagttatttttattatggttaatttatgatcgaagatattgtattaaagtagaggttgttttggtgtgagtttacgattgagtttacggtgcggatgtaatgatttattttagttaggtttacgtgtataagcggattattttagaatcggagttggttttttttttagggtattttttttttttttagttgtttgcgtggttggcgttttattattttggttatttgcgtaaaatgtatatgtgtgtcggtttttaattattttttttttttttttaatgtttggtgtttttttatggatgggtttttttttttttattagttggtttttgtgtttattgtttggttttatgatttttttgggtgtttcggtttagtattatttttatgtttattagtttttagtaagttttgagatagtaggggttgttttattcgtaggggttattttattattaggacggcgttgtttaaaggcgagtttgttttagataatagttaggagattttatagtttttagaattgtaagagaatataattgtgtgttagaagaatagtgagaataggaggcgttttatttcggaggtgtttattttttttaggagatgttttattttgggggtgtttattttttttaaggaaattatgtttcggttggaatgttaagaaggtgatatttaaatgaagaggtgtttattttggtttacgttatttttttaaacgagtatgttatcgtttttttttttttttgggaattttttttaaagttaagtttattttagtttttttttcggggagttggttttttatatagtttatattattttttttttatgttattttggttacgttatgattgttgagattggttacgaggggtgtgtttcggtttttcgggaatagagttgaatgttttttattttatgatattatgtttttattaggttttaggcgtttttagaaaatttattaagttaggcgtggtggtttacgtttgtaattttaatattttgggaagttaaggtggatagatcgtttgagtttaggagtttaagataaatttgggtaatatggtaaagtttcgattttattaaataatataaaaattggttaggggtggtggtatatgtttgtaattttagttattcgagaggttgaggtgagaggattatttgaggttaggagattaaggttgtagtgagttatgattatattattatattttagtttggatgatagagtgagattttgttttaaaaaaaaaaaataattaaaatttattaaatgttaggcgtggtggtttatgtttgtaattttagtattttgggaggttaaggtaggtttaaggtaggcggattatttgaggttaggagttcgaaattagtttggttaatatggtaaaattttgtttttattaaaaatataaaaaattagttaggtatgggggtgggcgtttgtaattttagttatttggaaggttgaggtagaagaattatttaaattcgggaggtagaggttgtagtgagtttagatcgtgttatagtattttagtttgggcgataaagtaagattttattttaaaaaaaaggttggattataggattataggataggtataagttttgagggagtttttaaggaggagggacgtattagatttttatttttattttagtttgtgaagatttattttcgtttgaggttttgtagagggttgattagtgatttttaaaaagatatgtttaatatttaattttaagaatttacgaatgtgattttatttggaaaaagggtttttgtagatgtgattagggatttcgggatgagattattttggatttgggatgggttttaaatttagtgttcggtgtttttataggagaaaggtagaaggggatttgggatataaagagatacggtggggagggttacgtgatgagagtagagattgtagatgttgttagagttaaggagcgtttgggttaacgtaagttggaggaggtaaggaagggtttttttttcgagttgtcggagggagtgtggttttgttaatattttgatgttaaatttgtggtttttagaattatgagcgaattaatttttgttgggttatttggtttttagtaatttgttttagtagttttaggatatttataacgagatttttgggaagatgaaatttttggttgtatagtggtttagggtgaggttagttggtgtggttatttattttttagtttagttttaattttattataattatattcgataaatggtttattgtgggttaacggatacgtggttattttagagttgttatattaggagtttagaggagcgagagttgtttttttttttttttttggagtcgtataaaaattttagatggttggagaagttatcggaggaattatattattttagatttttgttttattgttgggatatgtggtaatgaaataagattatttttgttagggatgttttatgggtaattgtttttttacggaggatattgtgagttgtatttagtcgggaaatattaggagatgtttgttattaggttggtagaatagggttttttagtatttttttttttattagagttttaagattgcgttttgggttttgtagttatatacggtcgtttttttttttttaatgtgtaggttttttgggaagttttttgttattatttttatagtggaatcggtataatttgtttaggggtagtaggtttttgttattttatacgtttttattttttttgtggagggagacgtagttaaggggtatttatatttatttatagaagcgagagtgttcgtgagtttgttattttgtagattttagaatttcgtacgtgattgtatagatttataggtttaattgggtagatttaaaggatttacgtagtagggaggagtatcggatagtttttttttttgtttgtaaggagttaatgtaattgaaggatatagaagaggtttttagttgagtattataattgtggatcgtgtatagtgttagaaagatgcggagttaggttatgttgggaggatttttatgttgttattggaaggtaaagtagtgttatttttttatttatagagtaggaggtttttatttttgttagttattttttttatttgtgaatttaagttttttaaagttagattttaatttcgtaagtttttaaaagtttttttgggttttttttttaatttttatcgattttaatttgttttaaaagtttgaagatcgtttatgtgttttggtttatttttgggaatttattttaaggaaataattagaagtatagaaagatttacgtacgaggatatttgtattagtattaaattgataaaatttggaaatagttcgggttttcgtagattttttaaatttatatgttaaaggtttgtattattattaaaattatatttttgaagatgagaaatgtcgagaatattaagtaaaaatagtaggatataagatgtatataaagattttaattttattttatatatatatgtgtagtttgtacgtatatatatatttatattcgggtagaaaataacgatttttggatggaatgaatggcggtgggtgttgtttattatatttttttgttttttgagatgtttatattatatggggattatttagtatgtttagggaataaaattatcgatattgtttttttttttttttttttttgagatagtttcgttttgtcgtttagattggagtgtagtggcgtaatttcggtttatcgtaagttttattttttaggtttacgttatttttttgttttagtttttcgagtagttgggattataggtgttcggttattacgtttggttaatttttttgtatttttagtagagatacgattttatcgtgttagttaggatggttttaatttgttgattttatgattcgtttgtttcggttttttaaagtgttgcgattataggcgtgagttattgtattcggttaatattgtttttaaaaaatatattttggtattggttgggtatggtggtttatatttataattttagtattttgggaatttgaggttagaggatcgtttgagttaggagttcgagattagtttgggtaaatggtaagattttatgttggaaaaataaaattaaaaaaaaaaaaatatatatatatatagattttgatgttaataagttggagggtgtgggtaattgtatgttggtttatttttatttttatttttggaaaaatattttatagtttaggatgggtatagggttttttttatttttaagtatttacggttttagttgttatataaaaagaggttatagtgggttattttttagatgtaaatttttttttttaggtttatggcggggtcgaaataggagtagtttggatttgggtttatttagagaggaatgtgtcgtataagggattattgttaaggtttttgttttgattataggttgtttggtaaatcgtttttagtttttgaaattagattaagtattttttggtgtatatattaggttttagtttggggagggaatattaagcgagttatagagttttgttttagtttgggataaatgttatgtaaagaaatggtagagtttaaggttagaataattttatgcgtagtttagttttcgtaggagggagtaacgtggtttttgtttagggtagggtggaattttaggtttaggttttaggaacgttagttttggttaaattgggttttttttgagtagtagtaaagtaggttttgtttttgaagaaatattggttatttaggagttagggttagggtttagggaagtcggatagatggtgttaaggagtagggaagtatttttttgtatgttattttgagtttgtaggaaaaagttacgggaaaattttatttggtagataattttttataatttttaggatttatagagtgagtttagtagtatgtacgttatgggtatttttttgtttttatttttttgtgatattggattttggtataggtttttgatttgtgtagggtggggtgggtagttaggtagggttttggcgttggtagagtggggtttagttgtaaaggtttttttattttttatttatttaggatttgggggacgaggtttaaaggtttggtgtgtttttaaggagtttaaggattgttttagggttggagataggacgtatgggtttgtatagggatcgtgttttttattttagggttgagagtaggagaattaaataggagagtgatataattatagtttattttgagttttagtgtttttagtgttatttgttgtaggaggtgatggggtaataaggtgtttttgaggttaggcgcggtggtttatgtttgtaattttaatattttgggaggttgaggtgggtggattatttgaggttaggagttcgagattagtttgattaaaatggagaaattttatttttattaaaaatataaaaatagttaggcgtggtggtgtatgtttgtaattttagttattcgggaggttgaggtagaatagtttgaatttaggaggcggaggttgtggtgagtcgagattgtgttattgtattttattttgggtaataagagcgtaattttattttaaataaaaataaataaataaataaaaaataagattttttgggtgtaggtatggtacgcggtaggggtgattgttgttggtgtaattattattttttgggtgtgtgtttgtgggggttgtgtatgttgaaatgtgtggttattttgttggtgattaaggttgttttggttttattgttattaattacgtttattgattttatatggtttattttcgtgtttttatttagagttttttttagtgtttaagttttcggaaggttggaaggagtgagtagtgtagtttttggttaagaattgaagtataaaaattttagtttttttatttaattttaggtgggataaggttgggggtacggtttgtagtttttttatgttgttcggtatgggggttgggtagttatttgtggttataatgagttggtgaggtattttttattggttggattttttgtttggtttatttttatatttaggtattttttggtgtttttttttattgaaatttttgttttaggatttgtttttggagggatataaattagttttttagaattggtttgggttgtttggtggaggagggaggtggtttttggggtaggtggagtaggtttcggatagggaggaggatatagttggggtgatggggaggggtgtgtttttaggaagtaaaatcgtttaaaaggaaaggtttaaaaataggcgtagtgaagttgagcggagtttgtaaagggaagttaggaaatagtagtgttagtggagggcggtttttaggttttttatagagagttatatttgtttagggatagggataacgtgaatagaaggtaaagtttatattaaggcggaggaggcgttttttttttagagagtcgtagttagatagtttaaatttgttaaaggtttgggagggaagaattagggtattattttatttttagtttaattttttttttagttttttttttttttgtttttttaaggttaggtttggttgggttatagtgttagtagttaagattcgtttttagtgtcggtttagttcgtaggaggttagtttggtggttaaaggttattgattgtttaggtttatttgtatacgtggtttaatgattgaggtttgggatttggggttattatttatagtatttttggataaggaggaaaagaattatttttattaatttttggatggaggtgtagggagcgttaatagtatttttgaaaattttaaatgtattaggggggttagtatttagggaagagttataggaggttattttgatggattttgatgattatttttgtttaagtgttaggaggaggtttttttttttttgtttttggtaattttgggtttaagaagttttaggtatttcggaggttttttttgtttattatagttttatttaagaggtttggtttattttgtaatgatgatgtgagaatgagtaggtttgtttagtgttagagtttgtggttggattttcggttgaggttaagagaaataaataagttttttttttttttttgtacgttataggaagagtagttcgttggttgtaaggggattttttattttgtttatggggtatagtagtttatagtattttttttagaaacggagtattggtaggtttgggtttttgtaagatggaatataaaggggtgggtagttgattttaatagttagtttttgggattttaaatttttttttattttttaattttgtgatgttaatttttttttggataaagttttttaataatttggtaagttagtattagttgaattagttttagtttgaattagtagttttttttagtttagttatagttttatttttttagaagggaaaagaagttttacggatttttttataaggaatttttagaatttgttatggtgttcgtaggggatattggtattaattttgggtttattaaatgtagtgggtttaatagtgttttttaaaacgatatgttttaagttttaatttttggaatttgcgaatatgattatatttggaaaacggatttttgtagatgtaattaaggtaagggttttaaggtgagattattttgaatttagtgggttttaaatttaatggtgagtatttttataaaagatagaaaaggagaaagatatatagatagggggagaaagttacgtggagataggggttagagattagagatgatggtgatgcgtttgtaggttaaggaacgttaggaatttttaggagtcgtcggaagttatgtttgtaagtttttaggttgtggtattttgttatagtaattttaggatatagattttaggaatagaatatagaaaagaaacgggaggaggtttagagtttgttgtggttattttagttattttattcgatttttttagtgtttcgttaattttgaagttttttttagttattgagttatcggttttgaaaaggagatatgggtgttttggagttggtttagtttggtaggaggtagtttcgttttattgtttttttattagttattagtttatataggttttttatagtgggtaagtgcgttgttgttttagttttcgtcggttttttttttgttcggttttattagtcgtagagttttttgttgttgttttttttggtttaagaggtttatatatttagtttttttgggataaatttagtttatatttgttgttttatcgtagttatttaagggttttttttattaacgtgttttttaagggatagtaagttatacggtcgttttatttggggttagaattgtgttttattagagtaaggttttggagtaattatatttagggttagggagttatttgtttaagaatagaaacgtgtggtcgggcgcggcggtttacgtttgtaattttagtattttgggaggtagaggcgggtagattacgaggttaggagatcgagattattttggttaatatagtgaaatttcgtttttattaaaaatataaaaaattagtcgggcgtggtggcgggcgtttgtagttttagttattcgggaggttgaggtaggagaatggcgtgaattcgggaggcggagtttgtagcgagtcgagatcgcgttattgtattttagtttgggcgatagagcgagatttcgttttaaaaaaaaaaaaaaaaagcgaaatgtgtagttttttttttttttatttttgaaatatgaaggggaggtgattgtaggttttttgggaaagatttttttattttttttttttttttttttttttaagacggagttttgttttgtcgtttaggttgcggtgtagtggtgttatttttgtttattgtaagtttcgtttttcgggtttatgttatttttttgttttcgtttttcgagtagttgggattacgggcgtttgtttgggatagttacgtagtagtttttgttttaagttatttttttttacgtagagtagaattaggattatagtaaaggttttagaggaggttatcgtttatagggttttgggttttttttttgaaaggtagtttagtttttaagagggtaatagcgattgattcgggacgaaggtttttttgtgtttgttttcgttatttatcgcgtgtttttggtttcggtagttatagggttattttaggcggattttaaagtggcgttaagttgttggatttttttttttttttattaaattagttatgggaatgggagtatttttggtatatttttagatgtgttgtattggtttagcgttttttttattttcgggttttaaattagttgttggttgttttattaggagtagattgaggggaaatgggcggaagtcgtaggggaagagatgtgaggtagataaagaggaagaattttttggttggggtggggtcgttagggtttgggtgggagggtcgtttatttttcgtttttggtggaaggtagtagaagggtgggacggatttgtgtgggagggtttaggtgtggtttgtttgggggtaggagagggattagatgattttttaggtttttttgggttaaagattttttgataaatggttgtcgttgaaggtaggagcgaggttttgggaggtgattgatttcgaaaaattataggttgtagttttgagggttttaaaggttaagtacggagttttttaaaatgaggttttttttagttttaatttatttacgttttttaggtggttttagatatttcgttagggtttttttggtagtttttcgttttcgattttggagatagagaaacgtgatgttggtttttggtttgtttatagttttttcgtttttattatagggtcgttagttatttttttagtttatcgcgtgttttttttttttttttattttcgattttttaataatagtagatttttttttaaatatttttttgtttagatttcgggttttacgtatgttgtttttagaaatgtattttagttttttgcgaggagttagtaaggttgttcggtgtttttttttatggatgggaagttttgtcggggattaggattcggatttggagattttgaggagcgtgttggttagtgtttgttttgaggttcgggatagagttgttaggtataggtagtatcggtgtgagggtttagtttttcggataagtttttttttgtttgtttttagatttgttattgtatatataggcggtgattatttttgatttgtttgggtagagaagttattttttttttttttttcgttttattgtttattaggggaaatgttataagtatttaaaaaatgtaaaaaaaaaaaaaaaaaaaaaaaagcgtttaatattaggggttatttggtttaggtggagtttttattaattacggggttttttgtgttgtggttttaaggcgggtagtcgatggtttttgttcgagttaatatgagttgtagtttaattataggggacggtgattttagggagtagagtttaggtttcggttatagttgtatttaggagttagttgttttttagatttgtagagttaggggagaggtttggaggatcggtattgaatgatatgatttaaagcgcgttaagttgggttggaggtgacggtagagttatagtggttatagagtttttacgtgaatttatacggatttgtttggtttaggttttgttgaattttagggtgaggaggatttggtttttatttttaaagatatgaagaggttgataaagaagagttataggtaaaagggggtggtgggtgtgttgtgtaggaggggtcgtaattggacgtagaagattttagaaggggtaattagagagaggtagtatttttagaagacgggttgtttggttgttttaaatagtttagggtgtgattgaggggattttcggatttagtcggggttttttttgttttgagataacgtattgggaaattttattaagtttatttaagaatttgaaaagttttttggaaatttagcgggtagggcgggtttttgggaggatttttggtatatcgcgagagttagatatagcgagggggttttatatttttgtttagaagttttacggtagaggggtagaagtttagggaggagtaggcgttgagattagaggggtttataagagaggggtttggggtagggggtagttgttgagaagtttaggaaacggcgtttgtttttggggaagtgaagttttgggaatagggttggtgaaggggggcgggaagggggaggtgggggtggagggttaggttagattaggtattttttttagtagtagatttatgagtttttggaatttgtttatagaagtgataagtgttttgtttttagtttcgtttatatatttatttattaagtgtggtagggatagtcgttttttattatttattttgggatttggatttaagtggaggtttttggaggggtagatttaggggaaagggtttttttagaagtagtcgttatttagaggatttgagatgagaattttattacgtttttattagatagaggagattcgcggtgttttcgagtttggttttttattttttatttagtagcgtttttttcgtttattttaagtttagaatattttgttttttttaagattagttgtcgtagtggattgaatagtgatttttaaaagatatgttagagttttagttttcggatttgtgaatgtgataggagttggaatagggtttttgtagatgtaataaaggattttaagaggagagtattttggatttagggtgggttttaaatgtaatgataagtatttttacgagatatagagatatagagaaaaggttatgtgaagacggagtagggagtggcgtgacgtatttatatgtttaggagtattcgggagttattagaagttgggagagaggtttgggtcggagtttttcgtagaggttttaaaggattagtttggtcgatattttgattttggatttttggtttttagaattatttttagtttttaaagttcgtggggttttgttgtagtagttttagtaaattgttacgggggttttttttttttgttaagtttggtatttaaagttttttagttatttggggttaattatattgattttgggatttttaggttattcgtgtgttttatttttttgtttaatttttagtgtttgtgtggttatagtttttttttcgtgatatgagttttttgggtttttgagtgtttatttgttttgtattgaaggttgaagttaaattttggagagaattgattttttttgtgggtagggtaggtattgtgtttttagtatagttagagggtattggttgaaatgtgtttttgtaaagtgttttttttatgttcgtattttttttttaagtggggaagttagagaggttttttcgattttttttttagttttttggggtaggaagtttgtggttatttgttcgtaaggattaggtggatagataattagttttttttaggttatattttattaatagagggttttttaattttgttggtggtttatgagagaaggaaaaattgaaggagttgtttatagtaaattttaaatttttgtgttagagaggtttatggttgagtaaggtatttttatttttattgttttgagttgttaatttagtttagtttagtattgtgatttttgatttgtttgtgggttacgggagtttggtttgttaattagtattttttagatatttattttgtgaagtttttagtggttgagtgttttttcgtttttttcggatagcgtgggttataggggatattgggtaggaagatagttaagtttttattgtttagaaattgtttgggtttattgtagtaatagggatttatttattagtatgaggtttttttgtaggaggggtgggggtaggagggagtttgtggggtatagggttgtaggaggagttatttttttttttattaaatcgtaggttttagttaagttatttttagtatggttgtttgcgtgggaagtttatagttgagggattgtttgtacgtggtatgtaggagttataagcgttatttatattttatttcgggttaggtagatgatttttttggttttagttttttgatgaggaataggaagggttggatcgaaagattttttttagttcggatatggaatgattttacgagggttacggtgaggtttgttttagtttcgtatattagttcgggttagtagtttttaaaggtatagtcgtaggggttttggagtagggataaggaggattagtttattttatttttttgggtagaggttaaggattttgtttttggtttatattttttgtggttaaaaatgtagaagtaagtagtgttggtagaggtatttagatttttgggtaaagtaggggttttatttgatattttaggtttggagtacgagaaaattagtttaggttttaggttttttgattgttagcgattagggaatgtgatatttttcggtttttgtttttttattttttaattttagggggagattaggttgggtgatgtgtttttttttttgatagtaaatttttatttatttttatttttatttttgttttaagagggggttttttatggtcgggcgtagtggtttacgtttgtaattttggaattttgggaggtcgagatggatggattatttgaggataggagtttgagattagtttggttaatatggtgaaattttgtttttattaaaaaatatgtgagttggtaattttaagtttttagtagttttcgaatggaggttttttttttgtaggatttttaaattttataaatatgagtgtttgtaatttagttatttaggaggttgaggtatgagaattatttgaatttgggaggtagaggttgtagtgaattaagaacgtgttatcgttattttagtttgggatatagtgaaattttgttaaaaaaaaaaaaaaaaaaaggtgggggtttttttatgttgtttaggttggttttaaatttttgggtttaaggaatttttttgttttagttttttagagtgttgggattacgggtacgagtttatgaattttaaaaaataatatttattgttttgtttttgattgtaaaaggaatttaggtataaagtcgaaaatttgtaaaatgtataaaaataaagggaaaaaatttataaatttataatttaggtaatttttattaatattttgataaatgtttttttattttttattggggagtgtgtgtgtgtgtgtgtgtgtgtgtgtgtgtgtgtgtgtgtgtgtttaaataggtttatatagtgatgatgttgggtgtttttttttatgtggcgttatgtggttgaggtttttatatattttgggttcgttttttcgatttttttgtagttttgatgttttgattttagatatgttatttttggttcggattgtttaggagaattatttttggattttgttaaaaaatggattgttggtttttaatttttggtggttttggtttaggagggttgggtaagtttgggtatttcggagtgtttttggggcgttgtaggtgtgaatttttgtttttttgaagatttataagttttattttttttattttttttttttttttcgagaattttataagaggaaagtttttattcggaggttgttagggattcggagttgttagtttatagttttattttgtttttattttttcgggagttatttaaggataatgtttagttttagttgttaagttttagttttagggttagttatatattgaaggatatgtagaagtcgtcgtgtgttgggtattgttgaggataaaggtttgaatgataagcgggaataaagttataaggttttaaaatttgttcgaggttttatagttagggtttcggaaatttatgaaaaaagttagtttaatattttgttacggaatataggtaggagagggagtagtttttagttagtttttagttagtttttcgttagtttttttgcgaattattttatttcgggttatagttagggtagtcgtcgtttttttttttgttcgatagtttttgagggtaggagttagtttgtttattattgttttttttttattagggtttggtattttgtttggtatgtagtagaagtttaagaagggtttattgtgtttattttgtaatagttaatgtgtatgagtgtttattatatttgaagatagtgatttatttttgtttttattgtatagatgggaaattgaggtattgagaggttgatgatttttttatattgtcgtgtgggtaagggtaaggttagatgtgagtcggtacgttgggttatcgcgttttttgtttatatttcgttttgggtttgggaaggttattttcggagatttttacgatgttgatatttcgtttagttttttcgtgtatttttttttacgttttttagttatttaaagtattagttaggtagtattgttattttggttttgtaaatttagttattgagtggaagagtagttaggttgaagtggggtagaggtagttttcgttagattttagggtcgggatttttagttatttttattttttaaggattagtagatagagatttttatcgtgtttagttaggggttagggaataggtttttatagtgggggagtgatggatggatgtaggtgcggattgggaggattcgggtcggttttttagcgttggagttttagtagtttaatttattttgttgggttttcgtggggattaaaagatattttgtatataaagtattagtttagggtttggtatttaggaggtgtttaattaaaggaaatggttatgaaaaataataaggagaagtttagttataggaggtgtttgtgggtaaggagagaatagttggaagggtttggatttgggttagagataaagaatgtaagagggagggagggagagaaggagggagggagagaaagagggagggaaagaaagagggagggagagagggagggtagggtaggtaatagttggttttagggtagttgtgtgtaggagtttgttttattatttaaatattaggagagatgtaaatatttgagtgaggtttttttagtttggttttgttgtggttatagttagggttggagaaagagttttttttttattagggttttcgttttgtgttttttattttagttgttttaagattttatgttttcgggttaggagtaggggtttgagagtagtaattaggtagggtagcggggttagggagggatttcgtttttgtttttatttttttttttcgtttttgtttttatttttttttttttgtatagtattgggtttgtaaaggtgcgaatgaaggatttttttttttattcgattttaaggggtttaggcggttaagggttttttttgtagtttagaaaaaaaagtaaagtagttttttttgaggttttttggtggaggtttagggtttaaagttcgttgttataaatttgtagttttttttgtttttttaatagtgttttttttttatttgggttattttattattttggttttttttagttttttaggttttttggggaggaggatagatgtagagtttggatttcgtgcgtagtagggtttttttaatgttgcggtgtatttcgtttggttgcgggagtttgttttatgttatgatttgtgttggtattaatagtttttttttttattttttatttgagtgtcgagggtagttgtgttaggtatagatatatagttttttatatatattatgagtttgtagaaatggtaagagaaggtcgagcgtagtggtttatatttgtaattttagtattttgggaagttaaggtgggcggattatttgaggtaaggagtttgagattagtttggttaataggatgaaattttgtttttattaaaaatataaaaaattagttgggcgtggtggtgcgtgtttggagttttagttatttaggaggttgaggtaggagaatcgtttgaatttaggaggcggaggatgtagtgagtcgagattacgttattgtattgtagtttgggtaataagagcgaaattttgttttaaaaaaaaagaaagaaagaaaaagaaaaaaagaaaaggaaaatggtaagagaagttggttagtattatttgtttggtaaatttttatttcggtttttggttaggaagtttttttttaggaagttttttcgttttatttttttttttgagtttatgtttagatttttagtgtttagaatagagttggtttttggggtatttatggatggttgttggataaataaataagttaattgttttttttatttttagcgatgtttttggtttggtagggtatttagtagtaatgtttttcgagtggattttaaggagtattttttatcgtgtagtttgtattagggattttagttttttattttaaattaaaggaaaaaatttaattttagtaaatatatagagtattttattttttgatttttaatggggggtaagaggtagaggatagaggagaagattatttttttaggtttggtttggagttaaaaagatttgtatgtttttattgtagataatatcggtttttgggggatatagggtaggggtttggtttgtttttcgtagggaaattgtttatttacgtggaaagcggggttaagggtttttgtttggaattagttttttgtatatggggtggggggtggggatagaaggagattttgtttggattgtatggaaatttattagattgttggttgttgatttggtaggagtagagttatttttattttttagggttttgtttgggggaggggagaggttaggtggttttgtttaggttatattttttatggttaggaatgttttttttttattagaaagaaagatgagataggtttattttgaattttttggatataggaagggggtttatttgtggtttaggtggtttttttttttatatttaaggggttttataaggaggtgttaggatttttaggttttgttttagggaattgttgtttgtaaaggttataggtagagatagttaggaatgttttttatgttattggttatgggttggaggttgcgaaattaggtatagaattagaaagatttgttataggttgtaaagggttttagagagttttagttttttagaggggtagtattgtagaaggggtgagaaggaaaaattagtttttaggaattgtttatttagagtttatataatatttaggtggtacgagataacggtttattttttattttattttttcgttgttttttaagatttgagtttttgggggtgtttttagtagatagggggatgtggggtaattgtttttttttaattgtatatttggaggtaatttatatttagatgattttttcgaggttgtgattagagtttggggtaggggaggggaagcgggtggatgggaaggcgagggagatttttttaggaaagtcgttttaggtgtttgtaaggttttatcgtttatatttaaggtataggtttttggttttgaggatataggaaattcgatgttatgtggggaggagggtattgtaatgtatttaaggttaggttttttgattttttggatattggataaatgatggtttttttagttggtttagagatgttaggagtgatagaatgttaaaggttgtagggggatatttagaaattttcgagaaagaagatggataaggaaaaataaaaaaatacgagaagtttagtagagtttgagtttcgtattttcggttttttttatggttacgggtaattttttggagatttagttacgggagtagtggaggtaggtatgggtgggggggggggcgggttttattgtttatggtttcggttgatatcgaggttatttttttgtttttttaagtttttgggtattggtaggatttttaaaaacgataataaatttgaagtttttagaattgtttgttggtttagtttaaacggagtttcggggttttgtagattaaattaaatagtttgagtttagaaatgttttaggcgtttgggggtgtttaggggttaattggtgggtttgtttggttggagagatgataaatttttttatttttgggattgtgttttagagagtttcggattttttggttttataagtaatttagagtttttaaatttgggaaaaattaagagggttttggaaagaaaggtagtgtttgattatttttttttagtggttttgttaagggagagtataggaatttggtttttggttgggtttttgggatgaattaaaataaaaagaaaaagtcgggggagggggtggcggaatcgttcggggttttagtttaggttatatattaaggagattttagaggagtaggttagttttattttcggtacgatgatggacgggtatttggttggttggtaaagggaagagatggtaatagtgaggttttgaatttagtggttaagatttatttttgagtgtgattttttttgatgtttgggtatgtaagaaatgggaggtggagaaaggaggaggagattttagttttgttttttcggtattaggttattagggaatagtattttttttttaacgggtaggtagaggttataggttgttaggttgagaagtttttggtttttatagataaatgtatagtttgtatatttgtattattttgggtgatgtttattacgtacggttattatgtacgttttttattattaagatagtcgacgagattaggtggttattgtgtatcgggtatcgtggtgattgtttgatattgatttttgggggtttaggttttcggtgggtttgtttttttaggtatttagttttttttttattttttgatatttcgggtttagtgtaggggtatgggggtgtttagtggatgggtttacgggttgggtaagtagtacgtagttttggtttattagtttttggttttattattagataagatgagattgttttagttgttagtttagttttgtattatatttgattgggtttttgtagaggtttgttggatgagaatgtttagggtagtaggtattattttttgggatgtatattttgttataatcgttttttagggaaaggttagtttgtagagtcgaacgtaggttgttagcgttttcgttgtttttatggttcggttatttagtaagtgtttattttattgttagcgtttggttttgtagatgggtatatggtttatttatttgtgatattttagggtgggggtgggggtagatggtggtagggaagattaggataattttttagtaagaggaatttgtagttaatatgacgttagtttttagaatgttagttaggtaggaaaaggggggttttatggttgtattgggagtttgagtatttgtcgggtttagagggatttttaggcgggcgttattggtattagtgtttgtcgtgttttttataattagtggtgattatgttgttcggttttatttatatagtggtattatataggtttttgtttgagattttttatttttagatttgtatatttaagtatttaaatttatttgttttttgtaaatgtttttttttttcgtttagatgttatattagtcgcgatatttattatattcgtaggaggtaggattcgtgtttagcgttatgggttgtattttagagttttttagtaatttttaaagagagttgtttttaattttattttgtaggtagggaaataggcgaagaaattgaagaaatcgaagtcgtttagttttttaatggtagagtgagggcggtttgggtatttttatattgttatattttttatttttttaaagtattgtttttttggatgtaaattttgtttattagttttatttaaaatttttttggatagttatagtttatagaaagtatttttagtttgtagttatttagttattgtaggggtgttttggcgtttatttttatttgttttttttcggatatttagtttagagaatttatagtttcgttgtaaggttgattatagtgtatttgttgtttgggtgttgtgttcgtttttttttaaatgaattaattcgtagtcgggatagtgggtttgtttggttttgggttttgaatttaaagagtattaagttagtgttgttagtggttgtgggattcgtgtaagaggtttgtttttattttttatggtttttgttttttattataaaagtttaaattgtagagaggtagtatttataggatgttttgagttttggttgaaaggtagggtttattacgtaagaggtttattggtattaattagggataggtttgtatttattattaagtaacggggtttttttttttagagaggaaagaggtatttgaattttgttagcgcgttagtttttacgtttcggaggtgttgggatttttagataagaaggtatatttatatggttttttttatttagaagttcgttttatagtttgttttgtttttagaatatagatttgggggtttttttcgggcgatagtgggggttcgggagaagtttagatgttatatagttttgggatttgagtacgtgggttttgggttagattgttttaataaatattaaggatttttggattttttttcggtgtgtaaatttggttatagtaaatatcgttgagtaaagtaggttaatagttggtatttggaaaggtttttgttatataaagattcgagttgtaatcgtgtttgcgataatagatttggtttgaatttacgaaagtatatgtcgttcgttagtttcgtgtttttattaattagaagggagaaagaggaaagggttattttttttgttattttattacgggtagtggcgggtgttgtagtcgtttggaggttcgtttgtatagtggaaaagtagaaaatgagattttaaaaattttattagttaaatataaaatattttttttgttgttacgtggcggtttttatagagttttaaaattttgaagttcggagatttattttgaagggggagtaaaggcgggatgcgggaagtttgagtttatggaagatattgatattttttttatttttgggaattttgagtttgaaggattcggtttgaatagcggaaggattgaatttttgtgtaatttatcggtgatggaatataaagttatggtgttttcggtttttaagacgggagggatggggaaggttttgggtgaaggggataggcggggaaggaaaaggtgaagagaaaggtgttttttagggagggggtagatgtgtttaggatatgggatattggtagaattttaatttcgagtatatatataggtttacggacggtttttcgtttatttgttttttacgggtgtgttgtgtcggtttgggtatttgtttttttttttatgttaggttatttgtcgtttattttgtatattgttattagttttaagttttttagaatattttgattagggttttgtggtttttgttataggattttaggtttagacgtttgttcgattggaaaattgtttttagagatgtcgtggtttagagttcgttttgttttggggtggtttttggagttttcgttttttagtaatttatatggtgataggtatttatattcgttggttttaggaattttggggttattattttagcgttgtaaggagttggtagttttttttttattttttcggtttattttgtaggaattaagatattaggtgagtcgtttcgggaaagagatttgtgtttttacggcgttgtttttgcgtttatttttagttattttagatgtttttcgtggattagttgtattttcggcgggtatgtttggtttttcgtagtttggtttatatgatttttataggtaggtttttttttatgttttagttttttttttagttagtttattttagttttttttattgttgttggttgttgttggttagaaggttttttttttttttgtaatttaatttttatttttttttaaggttcgttttttttatattgattttttttttgttagttagtggtgatttttttttattttgattcggaagttgtttgtttatattatttttggttgggttgaattatatttttttttttattttttttaattattttttttttacgtttgtttgtttatttaaggttgtttaatttttatatatatatttttatattttttaattatattttaggttttttgggtattagggagggttatttttttatattttaggttagtttttatgtatatgcgtatttatgtatatatatatttttttacgtttatcgattcgggttatttgatggttttaagattagaatttttagtaaaattatttaggatatataagggggagattgataaatatagggaattagtagattgaggttttatttttcgagattgagaaatttttttttagagttaaaggattgttaattgttgtattaggatggttttaatgagtttattgttttggattaaattatagggttataaaattggtttgggagatagtcgtagaagtagttttagatggaggtatatgggggtaagggtggagttatatttagagatttaaggaaggggtattaataatttttatagtgtaaatggtgatagttgtataacgaatataattttaaattttggttttttttttcgttatagggttttcgttgagatacgagagtttttttttagaaattttattgggggttcgatattttttgttaggaattgagagtagagatttcgatttcgtaggtaggaggagagttttgtataatatagggtttttttttataagggtttattggaaagtggttagatcggttaagtcgtgttatttggatatttgggataaggaaggtttttggaggagcggtcgtagggaggagttgtaaagaggtaggggtagggaggttatatttattcggggattgtaggaggtttaacggaatatagtggatttagggagattttagtatgagtatgtgtttaaagatgtttagatgaggaggtgttgtgggggaggggggcgggaatagtaagtttttttagttttgtagatttagattttttttttttttgggaagtagggatgtaaagggatagagtttgaaaaagggtttttattattaagttgataaagtaattacgatgtttttagtttatattttgtatagcgttagtggttattggattataattttttttcgttttttcgtcgttttatattttttttaggtttagttttgaagaatagttattggtattttgtttggcgtttagttaaagttttggttttttaggaggtttcgttttttttatttagatagggttgattttaggtgggtcgtgtgggtagttgggtttaggatatttagatgttagttttggttttggttatggagcggggaggattttaggttggttattttttagtttggtttgatatttggatagtttgtttattttaatatagtttttttttttttcggtttattagagggttttgtttaagttagtttaggagttttttcgaggggcgggggttttaggtttcggtagaggtaggttcgttttttagaagttttgttttagagcgttggagattattgtgtgagtttttttttcgtttgttgtatttattttcgcggacgtaggacgtagagttttagtatcggtagttaagaggacgtaggaaagcgtacgtatttataggtttagagacgcggacgttagatttaggtttggatagagtagtttcgtaagttttaatatattttgtaaatttcgaagataggagagagttaaaatattttttttgttcgtacgtaggttttttttgttttttacggttcgattttgggaggcggatgaggatatttttaggtttggatgggggttatgggatattttattttagattttgttacgatttgggttgtgttcgttcggtgttttcggtttacgggttgtataatttggcggtttcgaaattggcgtgggggaggggagggttgtttattcgagtaggacgcggttgtttatttagtcggaggtgaggaacgatttttttatttcgttgtcgggtttaagcggggttcgagagtcgtcggggagagttaaagggaggggatcgatggattttttagagtgaaattgtgcgttttggagagtttcgaggtagtttcgcgagttttcgaggaggtcgttgtcgtttggtaaatataaataataataaaaggaaggaaatttaggcggtagtgcgtagaacgagtatagggttttgtgagggcgcgtagggtttacgcgggtgtttttaatagggttttttacgtaggcggcgcgggtacggggtcgggggcgcgcggcgtttttagcgggagggcgtttggattaggggtttcgtttttttttagcgtattttcgtttttttttagcgtattttcgtttcgcgttaggtttattcgtagggttttttttagtacgttcgcggtcgtagtagttagtttagtatttattttcgaagttcgaaatgattttatttagttgcgcgttgatcgcggggttcgatatgatggttggtgggtagcgggtcgcgcggagggtagcggcgaggaagcgttttcggcggggttcgggttttgcgcgttggttggggcgtcgcgttcgcgtttttgtagtgtagagttagtcgtcggaggagtttttaggttttttggtttagttgaatgaatgggggaggaaggcgggcgtcggttttttttcgcgcgttgcgttttcgtttcgttttcgtttttcgggcggattaggttttcgtattcgtatcggtttttttgtttcgtattggttgtttcgttcgtttgttaaggttaggtttggggggttggggttcgagtggtcgttgggggatagttttgggtatacgatcggagcgtttttttttttttcgtttggttcgcgtttaggggacggcgagagacgcggttttagttttttttttcgggcgtttcgttgcggttagatgtgggcggatgtggaggtcgggttatggcgaggagggcgggcgtttagaggggaagagattttttttttttttcgggcgtagggtttttttgtaggaggttgtatttgggtagttaaataaagttttttgttatcgtcgtcgcgcgttttgcgtttgtaagggttaaacggtagcgtacgcggttggtaggtaggatttcggtttgtgggtttaagagtcgaggggcgtagggcgaatatgcgagttttatggtattagcgagaggttattaatttttatttatcgagggtatttttgtagttaatatttttattacgattatcgtttcgggggttatcgttgtatttttttgggtgagttttggagaaggtattgttcgggagaaggggtatagggcggggatggaatacggttgttagagaagttagggacgggcgacgtttttttttttttataataagggttttttgagagtaggaagtagattttgttaggagtagacgttttcgaaggaaggtgtgaaggaaggagttaggtagtgagtgagtagaaagggagttgttttaagggttttttttttttttttgggttttaatttgaggtttagttttttttttaggttagcggtttttatttttaaattatattatttataaggtaggtagggtcgaggggttggggtagatttggggatttgggttagatatagaatttgagaagtaataggtttttatttttaagaagggttttttaggtttgttatttataagagagagaggcgttttttttattcgttttggaaagttagaaatttatttttgtatgttttttttgttatttcgttttttagattttcggtttttgtttagagttaggggttatgtgagaatttatagtatggaataatatttttattttcgaagtagtaggtcgtaacgttataattgtatttcggttttttgaatgtgtggtcggggagcgtttgatagtttattttgggtttgaggtcgttcgttgtttatttgtttttttttattttttttgaaatattttaaatgtgtaggagtgttgagattttttagttattttggagaggcggggggtagggggttttttgcggaaaatgttttaggtttgggtggttttttaagtagatgaaattaagttttttttttttaagaaaagtaggtatttttttttttatgttttggatattttgaattatttttaattaagtgagtttgtggatatgggaattgtaaaattatagatattttagatgcgtgtatattttcgtcggtttgggagttcgggttttagaaatgtagttattgttgttattaatagtatttcgtattttttacgttaggttagggtatgttttgtttgaattttagtatttgggtttatcggatagtttagtttttattgggttatttgtttacgtcgtatttggggatttgggggtttagtatttaagaaatttagtttaataatatagtttttttgggaagatgtcgggttcggtataatagttattttaagttatagtattattttcgagtgtttttttaaaaagtatttggtgagtgtggatatatttatgtaattgtttttttttagggttggtatggagttttattagattagtatagggttagttaattgtatattttttatttttacgtatagtgtagtaaatatatttagttttttggggagcgtcgttagggtgtacgttttattaaaatgggaatttaagggataatggtaggagagtagttagaaagtgcgtatgttttcgtgattgtgtttagagtttatcggttttagttttagttattgtttttttaatgtaattatttagagttatatgattaggtttagaaatttttaggtaaggaggtttttcgagtttttttaggaaatttaaattagggtttggttatatttttagttaggaagtttattttcgtatttaattaattgttttaattgtatattatttattttttttttttttttgtttttagaggagatgggaaatagttgggtattattttttaagttataattattttttttatatttaaggataatttagttgttttttggtttttttttttttagtttaaattatttttttttagttttttaattatatttcgagttgttttttgattatagttaagggttgggtttagtttggggttttaggattttaatgaggttttattgttataggatagtgaggaggttttttattttttttttttagggttttagggtttggatatatagttttagaaggggtattgggtagagaagatgtacgtcggtagtagagaggaaattgagttgaaatttggtaagaataaaagaattataaaggtttgtgtatttagtaaggtgtatttttttacggttataaaagaaggtaagatcgattgtaggtttggttaaagggatcgtttgcgtttttagtgtataacgagatttatagtgggtcggtgattttttttaaaataaagatatgtttatttggaattttaaatgtgatttgattttgtttaagggtttttgtagaaagaatttaggtaaggattttaagataaggtgggttttaaatttaatgttgtgtttttttaagagatagaaaagaaagtatagagatatagaaaaaggttttgtgaagatagaggtagagatcggagtgatgtagttataggttaaggaatatttggggttattagaagttggaagaggtaaagaaaggtttttttttggagtttttagaggaagttggttttgttggtattttgattttagatttttggtttttagaattgtgagaggatatattttttttgttataagttatttagtttcgatagttgttatagtagttaggagaaattcgtgttttatttttatttgtattatgttttgaggttaaagttttatatagtaaagatgtttaagtaattataaattttgtgggtagtttattcgtttagtagattattgttttaagggaagggggatggggatagggaagagagttataggaaatttttgtacgtttttttggaaatgggaaggagtaggtttggagagaaattttataggttaggtttcggggaaatgaagtttataaagcgtgggaacggagtggggaggaaatttacgaggaagtagcgtttggcgtatatatttatatttatgatttttttttaggtatagtttttatggagaggtttagttggtagggaagtaaaagaggttcggagagcgaaggaaggtgaggggtttttttttagtaatattgaggttttagacgggatattttattaggtggtaggttgtgtttttatagatagagattttttaagggtagggtttagatggttttatttttgcgtggtttgatataaagtaggttttttagagttgtcgagttttgggttcgttagtggtagagttttttatagttttttaagtttttatagttttttattttaggaaacggtgttattatttatttagttgtttaagttaagttttcgggtattattgttgattttttttttttttttatttttagtatttaaattatggtgcgtttttatttttagtttttttgcgaattagtttgaattttttttttttagtagtgtgttagttaacggttaataatcggttatttggggttagtaaaagtaataatatttagtttttcgatttgtagcgtttgtttatttttgtggtgttaatatttttgttttggttaattttttttttttttttttttttttgatagggttttattttgttattcggtttggagtgtagtggggtaattttggtttattgtaaattttattttttaggtttaagtgatttttttgttttagttttttaagtagttcggattataggtattcgttattatttttggttaatttttgtatttttattagagatgaggatttattttgttggttaggttggttttgaatttagatgatttgtttgttttggttttttaaagtgttgggattataggtatgagttatcgtgtttagtcggttaattttaagttatttgtatgatattattggaggtgagattgagaagagatgtttagttattacgaatatagtgtttttattatataaatataattttaagaatataatcgtaataggatagataatagttaaatgttgtaaaaaatttaagaggtgatgaaagttgtgtatttattattttttgttttaaatataattatttataagtaattttttaatgttttgtttaattttttttttataatttgtaatttaatttatattgtaaaaatttattatttttttaatagagtaatgtatttttattgtgataaaatatatgtaatataaaatttattatttttggttagttattatggtttacgtttgtaattttagtattttggaaggttaaggtgggtggattatttgaggttaggagtttaagattagtttggttaatatggtgaaattttgtttttattaaaaatataaaaattagtcgggcgtggtggtaaacgtttataattttagttttttgggaggttgaggtacgagaatcgtttgaatttgggaggcggaggttatagtgagttaagattacgttagtgtattttagtttgggcgatagagcgagatttcgttttaaaaaaaaaaaaaataaaaataaaaaagataaatttattattttaattaagtttttatgttagtgatattaagtatatttatattgtatatttattaatattatttattttcgaaattttttttaattttttaaattgaaattttgtttttattaaataataattttttattttttttttttttagttgttggtaatcgttattttaatttttttatgaatttgattttatataagtgaaattatataatatttgtttttgtgagataggtttacgtagtatgaggtttttaaggtttattatttaaggtttatatgtagtgatagaatttcgttttttttgaaggttgaatgatattttattgtgtgtatatatattttgtatatttattttttttatatttgagtaattgagagtaaagttgttataaatatgggtgtgtaaatatttgtttaagtttttgtttttattattttattattattattttatttattattagtattattattattttagatagttttattttgtcgttcgggttgtagtgtagtggcgtgatttcggtttattgtaattttcgttttttagatcggagtaatttttttgttttagtttttcgagtagttgggattataggtattcgttattatgttcggttaatttttgtttttttagtagagatggggttttatcgtgttggttagggtagtttcgaatttttggttttaagtgatttattttttttagttttttaaagtgttgggattatagacgtgagttattgcgtttagttattattttagttttaaatattatagtaatttttttattgttttatgagattttttgagatagtggttttagggattttatatatatttgttcgattttgtgtaatgataaagcgtagttttttttgtagaatggtagagtcgggagatttttgatggggtatgagtttaaaggggtagaggggacgtttagaatatatatggattttttatgtgcgttttgttagttattaagtagatttgttttagtttcgatatgtttaggattatagatagtgtatggtttttatttgggttaagttttcggaattttttttttttttatattatttgtattgggagtagttattaggttgtggattattaagttttttttaggttatttgagtttgtatttttttatttagtttgattgagtcggtgtgtagttattatattttattatattttttgtttggtcgttttaatgtaattataaggttttatttaaagaagtatatgattaatttgttttttagattttttagtgatttttttagtttgttttgtgtagaatatttatagtaaaatttgattatagcggtttgagtttttatttttaaggtaggggattttttaaataaagtattagtgttttaaatttatgattttttaaggaggtttttggtttttagtatagtaaatgttttgttttatggtttttcggttttttatttttattttattcgagtttttcgtttcggtatttgggattgaattagtttggagttttttagttttgttgtttgttggttttgatgatattattagggattgtagtattgtttggattttttgttgttatattttattgtaataatatttaatttgatggaattttgggagtaagtggtaggggtagggatggtggtggttaggggttgtatatatataggatagaaggattgaaggattgggtggaaagtatgatttttttaagatgatttttttttagtagaattttggttgtgttttttgaatagtatttgtttatttgtatatttggtgagttttgtgattagtaaatttagatgtttgggaggttattagcggttttgttgaggtataatttagatatgatagtttatgttttttttttgatttttttttttttatatagttttatgattagagcgttttttttatttttgtttttattttagtttcgtaagatatagtcgtgaaatggttaaagtttttaattttttagtattcgtttgagattggagtataaaaatgagatggggatatagtattttatggatattagtgatggaaaaaaattttttgattttttcgggagttttgtaaagttatattaggggataagaaggagtggttagtttggtatcgatttagttttaaagtagttagtgattaaagtatatagttggtatttttttatttttagggtattaggaggtttggttagaatttatgttagttaggagaaataggttgtttttggggtttttggtgttttggtttttttattgtttttttgaagaaggtattttgttttgtggggtttgaggttggaggtaatttgttatcgatgtagtgtagggatgagggttgagttattagtttgttttagttttacgttagtaggaataatagggatttaagtagagaagaaagtatttatttttaaagttattatagtgattgaggcgacgtggtttttagggagtttttttttttgttggttttttgtggatcgcggttttatgttttaataatgtttttgtttatttcgtaaggtttagtaggtggaaggaaagagggtggaggttgggagtggcggtttggtaattcgggaagggtagggagtaggaatatgtttttttttttttgtattcgtttagaaggttttatagggtttgttttgttatttataattttagggagatttttttttaatgtttgttttataaatgtttatttattttatatttgaatatttttagttatagggagtttagtatttatttatgttatttattttatttttggttgtttaaaaaagaggaaagagagagaaagaaaagataggaaagatagagaaagggggaaagagagagagaggaaagaaagaaagaggaaagaataagataggaaggaaagaaaaaggaagggaacggaagggaaggaagagagggaagaaagagagaaagagagagaaagaggtataaataaggtaggttttatggagtagagatttaataagggagtaaaatatatttgtagttaggttgtagatggatttttataggagcgtatatttattttatttttttcggaatagaaaagtggaaagaagatgtagcggtgtgggtgggtggcggttttttttgggggtttggaatgtggggtattagtttttttggttttgagaaggagattaagattattaatatttatagtggagatcgaattatataagggttggggatatcgttttttttgtatttttaataaagattcgatgttttaattatgggaatttgtggaagaagaaataaaattggttttggggttttttagagaattggttttttatttagtggtggttgtgaagaaatttttggagttagttttagcggtttgggtttgtatagttgagattgtttttggaagttgagtggaagtggggagtttttaggtatagttgggttttgttttttattttagttagtagttttaggatttttgggtgttttagagttttttttagagggtaaatttagagtatgagggagcggggagatgtttaatattgggggatttttgttcgtttttgtttttagtttcgttgatttgaatagggaggttatgggtgtttaggggtagaattgtgggttggtaagtttttagttttggtttttttttgtttttttttttttattgttattgattatttttggttatatgttgatatttttataggatgatggagaagagagaagaggaattttttcgttttgtttagtatattttaaagaggttttagtgtaaaggtatcgacgtttatagttaaatgtgtgtgggggttttttaggagtgggacgtttttatttcgttttagattgttatgaatcgatagaaggttttatgttattaaatatattttattaataaattattttaatatttagtaaaaaaataaataaaaatgtatgtatttcgtgttttgtagtgtttttatgtcgtatttttttttgtatttgagtttcggttcgcgtttttggtttgtcgttttgggaatagaacgttttgcgtgggaggtagataggaagcgcggggtgcgttggttgggtttttttagataatttggtattgttttttttagataatgaaattttttttattttgagtgtttttggaagttagtcggtagttagattaatttaaatgaattatttgttttttttgtgaagtgattttagggatttaatgggtttgttattaatatagtttttttcgtattttgttttttttttttatttttttttttttgtatgagttattggttacgatgattcggtttagttaagggatttggttagttttggttaggttatgtgagagatagtataaaggattaaggttgtcggaattaggttagaggttgagggttatacggattttttggagtgtttgtaattggggatttttaaggttgttttttggttttggggatttgtttatttggggatagttttaagggagatttttaaaagtagggagttaaaagggtgaattaatatagaaatattgagggttagggagaatttgaagatgggttcggttgggtatagtggtttatgtttgtaattttagtattttgggaggttaaggtgggcggattatttgaggttaggaattcgagattagtttggttaatatggtgaaatattatttttattaaaaatataaaaattagtcgggtgtggtggtaggtgtttgtaattttagttatttaggaggttgaggtaggaggattgtttgaacgtaggaggtagaggtggtagtgagttaagattatattattgtattttagtttgggtaatagagtgagattttattttaaaaaaaaaaaaaaaaaaaaaaaaaagataggtttaaggtttggagagttagaagttatttttttatttttgggtggtttattttgagattgtattacgttagagaaagttgcgggagtgtttgtttataatttataagtaatattgttttttttttttattagtttttggttttagtaggtttttgattcgtgttttttttagggttttgggtttttttaagttggattttcggttgttggtgggatgattatgtgatttgttatttttttgtttatcgttttgggtagtttttgttatttggtgtatatagagtggagtttagtaaggtcggggtcgtcgattttttgttagttatatttgtttttttttacgttattttttttcgttttggttatgtttaggggtttatatttttttataagttaggtgttagatttttgtgtttgttttattttgttttttttgtttggtgggttttttatattttttttggtttgatttaggtttgatttgtttttaggttttagtttagaggttgttttttttaggaagtttttttgggatcgttagatgaagggatttttttttggattttttttttatttttatagttttaggaatagtttttaatttaggttttattgagttagtgtggtatttaggagagttataagcgtgtgacgaacgtgttgaagtttttttaaaagttgaaggagttttgtgaatatatagtagtattagtttagattgcgaaggtataggggagttagttttttttagtttcgtttgtttttggttttttttttgaggaggtgggagttagttagttgggattaggaggtgggttttatggagtagagatttaataagggaataaaataaattagagaatttttttgttgtaaggaatttagataaggagtatttagttagaggaggaaggaagagatcggtagtagattttttttgttttagtagttttgtaagttagatgggttaattttttagtatagttgttttttagtatagagaaattttttatttttagtaatagggtgggaatatttttagatagggttacggttattttggttatagggattacggagtttgagtttttgtggtttgttttatttatgtggttatagattttgagtatatatttggagttatagagtttaaagggtagggtagggtagggaatttgtttgattggtgaaggttattttattatttggagtataggtttttgtttttaaatttatatggagttttcgatacggggtatcgattttaaggaggtgaatgtggatatttaaggttagtgaatggttaggtgttaatatatcgataggtttttggttttttttttaatattgagggtaggaaataaatggggtttatatggtgtatatggtttttagagttagtaaggtgtgtaagattcggtagttgagaaaattgattatttggtcgggcgcggtggtttacgtttgtaattttagtattttgggaggtcgaggcgggcggattacgaggttaagagatcgagattattttggttaatacggtgaaattttgtttttattaaaaatataaaaaattagtcggacgcggtggtaggcgtttgtagttttagttatttcggaggttgaggcgggagaatggcgtgaatttgggaggcggagtttgtagtgagtcgagatagcgttattgtattttagtttgggcgaaagagcgagattttattttaaaaaaaaaaagaaaagaaaagaaaagaaaattgattattcgattatgaataagttagaatatttatttagaaaaaaaaaatagttttgtttaattggggatttaaaattttaggatttatgttttttttttatagagttatattatttttttaatgtttattttcgattttatttgtttgttaagttttaggtatttagaatatagtatgatagtaagttttgtgatttttataggtttttttaatttattttaggtatagttatatttttagttttgagtagtagggagtgatatgtagatggttatttagatagagaaagatttttaaaaggagggtaggttttgtttcgtaggtagtatttattgatatagatattagtaggtaaattttttaggaagatttttattaagaaagaacgaaagaggtttagtgcggtggtttacgtttgtaattttagtattttgggaggttaaggcgggtggattattttaggtaaggagttcgatattagtttggttaatgtggtgaaattttatttttattaaaaatataaaatttagttggacgtggtggtgggtatttgtaattttagttatttgggaggttgaggtaggagaattatttgattttaggaggtagaggttgtagtgagttaggattatattattgtattttagtttggggggtaatagagagagatttcgttttaaaaaaaaaaaaaaaaaaaaaaaggatgaaagataaataaggttgaaattggtaggttggtatatttttaataatttattttaggtcgggcgtagtggtataatgttagtattttgggaggtcgaggagggtagattgcgaggttaggagatcgagattattttggttaatacggtgaaatttcgtttttattaaaaatataaaaaattagtcgggtgtggtggcgggcgtttgtagttttagttattttggaagtttaggtaggagaatggtgtgaattagggaggcggagtttgtagtgagcggagatcgtattattttacgttagtttgggcgatagagcgagatttcgttttaaaaaaaaaaagaaataaaaaataaaaataataaaaaaaaaataatttattttagtagggagtaggaggtaaggtttgatatgtagtgtttgttaatttttgtggtgtaaatatatttattgtggtaaattttaagttataaataggatattattaaatatagagttgggaaaagatatgtatattattggataaaacgtttaggtagttacggtttatttttttttgggaaggggggtatgtttagaatgttttttattatggagaatgattgtggtaaatagggtttaattggtaggttgatttaattaattgtttattgatgtgatgtggggtaggtttttgaggttgtttttatgtttagggaagaaggtggttatgtggttatagatttggttttgggtttgttttttttttttttttttgagatagagttttgttttttttttttaggttggagtgtaatggtgtgattttggtttattgtaattttcgttttttgggtttaagtaatttttttgttttagttttttaagtagttgggattataggtgtttattattatgtttagttaattttgtatttgtagtatagatggggttgttggttaggttagttttaaatttttgattttaggtgatttatttattttggttttttaaagtgttaggattataggtatgagttattgcgtttattcgggtttgttattttgaggatatatttggagttatgtgtttatgattttttttttattttaaaattttgattttattttattgtttttagagataggttttgttttgttatttaggttggagtgtagtggtgtaattatagtttattgtagtttcgaatttttaggtttaagcgatttttttattttagtttttcgagtagttggggttgggtttataggtgttattatatttagttatattttatatttttttgtagagatagggttttgtaatttgtttaaattggttttaaatttttggttttaagtaatttttttatttttagttttataaagtgttgggattatagatgttagttagtgtatttagtagttattatgattgattggtgacgtttgttttagttttaggatgaaagagtagtagtattttagttaagtatttgtggtttttgattggaagacgttttttttgttttttaagtatagtgtaaatgttatttttttggtaagtttttttttaattttattttttttttggtatagggtttgttatagttttgtttatataaagagagttattagtgtatgtggtatagatgttagttgtttttttaatatttgagtttttttttttttatagtaattgaagttttggttgtgtatagggaagtttagttgaagaatatattgtttagtttttttgatgataggagcggttatataattgggttttggttagtgggaaggagttgaagtgtttaatttttaggttatgtttttaaaaataaagagggatatttgttttttttttttttttttttttttttttttttggttggagtgtagatatgacggtaggagttggaattattttagtttaagagatggaagttgtgtgtcgaggatgtattaaaggaatgaattaggttcgggttgttttgggtttttataacgattgatatttggattgggacgtgggttcgagtgttgtttagtttttgatgttttagtttttgttatatagttagatggtgttttgattaatttaaggtatggttattattttatttgtttggtagggtaggggttttatttttatacgttgagtttttggtagaatttggtgtaatatatatagttaaagtaaaatgaataggttattttaattaaggtttattttgtgggttggttttggtatttggttttaatttttattttattttatttatttattatttttgagatagagttttatatttgttgtttagtttagagaggagtggtgcgatttcggtttattgtaatttttattttttaggtttaagtgattttcgtgttttagtagttgggtagttgggttttttttgagtagttgggattataggtgtacgttattatgtttggttaatttttgtattttttgtagagatggggttttattatgttggttaggttggttttgaatttttgattttaagtgatttattcgttttggttttttaaagtgttgggattataggtatgagttatcgtgtttagttagttttggtatttggaattggaaaataatagtttgagttttagaggggataaatataaatatgaggtagaaggaatagtaagtaaatacgtgtttagagtaggttgggttgtttatatttttaaaatatcgttaggtgttgaggtttgggttttgtgttagatttttgggtgtagatttcgtggggatatttattgggtagtgggatttttggtaagttatattatttttttgagttttcgttgattaagttgtttattgagaataatatttagattgaaaggatttataataatatgtgaaaagtgtttggtttaaaataggagtttggtaattggtagtttttattatttataatatatagtttaacgttttcgttttataggaatgaaaataggatttagataggtaaaatgatttgttgagggtcgtatagtgttaatgatagagttaggattagggtttggggttttgattttttttgtagtattttggttttgtgagaagtggttttgggtgaatataaggagtgaggagttggtgagaaattttgaaaatgaagttgggtgtggtggtggatgtttgcggttttagttatttaggaggttgaggtaggaggattgtttgagttcgggagttggaggttgtagtgtgttatgattgtattatcgtattttagtttaggtgatttagtaagattttattttagaaaaggaaaggaaaggagaggggaggggaagggagggaatttttgatagtgattttagagataattaggatgatttgaaattattttgaaatgtattaaaaaataaaaataaaatggatttatggttaggcgaaggagggatagatggacggtgaggtgataaagtaggtgtagtttggtgttagtggtagaatttaggtgatggttgaatgtgttttttgtaaaatgtttttaatttgattatgtgttttgaatatttttataatagaatggagggaagagaaaggtaagagggagttattgtagttgttgtagtaggagtagattttaaaatattatgtattagatttttagttttgtttttgtggatgtgtttttgtttttttttttgggatttaaggatatttaatgagcgtatgtgtttttaagtttttttgtttttttatttgtttttatatttggaagattttataggtggcgtgggttagttttttattttgttttttgtgtttttagtgtatgatagatattgagtgagtgttagttttttttttcgatattttgtttgtttgtttagagaggtttttttatagtttagttattaggttgatgtttttggacgtttggtcgatagtttttttagttgtgttttagtgatttggtaggtgttttgagttataaataaggttattagtggatgtttttaaagttttttttattacggcgttttttttttttttattaatagttcgttatgatagttagtttgtatgagtttttttttagggttgtgttttttgaggttgtttagcgtttggtttgttagagtttattagatagggtgtttattttttttaggtttgagtttttatttagagaattatttatagaaggataatggagaaaggtagttggggtattaaatggagtgtgtttgtatgtggggggggaggggagggggagggaaagtaggaagagaagatataagaggagaaataagaataagaggaaatatagaaggaggaggagtagttttttttatgggggtggattttgtgtttagttttttattaaggatattatatttattatttcgtttggtttttacgaatatttttaaggtcgtttttttttggtttttatttttttattaggaagcggaggtatagagtgagaaagagttgtttaaggtttttaggtagtttacggagttattgggagttatatttaattcgtttaattttacgtttttgtttttagttattataataaattattaaggttttatagttataggagtttagttcggagtttttatcgggttttttaaggtagggagatggggttggaggttatgttaggtgtacggtgtttagagttgtttaggaagtttcgcggtgcgggttgggtattaggtagtgtttgtaggatggagaaatgaatgaggttgagatatagtgtcgttttttttaaacgtgattttttttgagtttttgtgattggttatttgagagggtagttttggttttttggcgtttatgttcgggtttagagatgttttttttagttaggtttttttttgaggatggaaatttagaattttattataggaggaagagttgggagtattttattttttttttttttttgagacggagtttcgttttgtcgtttaggttggagtgtagtgacgcgatttcggtttattgtaagtttcgttttttgggtttacgttatttttttgttttagtttttcgagtagttgggattataggtattcgttattacgttcggttaattttttgtatttttagtagagacggggttttatcgtgttagttaggatggtttcgattttttgattttgtgattcgtttatttcggttttttaaagtgttgggattataggtgtgagttatcgcgttcggttagggagtatttttaagatttttgcggagggttgtttaggtttaagttttttattatggaaggttttttagatgcggtagttacggtgtatgggttgagggtttttatttattaagaagtaggagtatttgatgtatatttagtttacgatttttatttatttgggggttgtgtttgtagttacgtgatataagggaatagttatagtagtgggttataaagagagtgtgggttaatgtgtaggggtagaattttgatagttttttatgggttggtagtagggaggggtatatttgtataaattttatacgtatagttttttatatatatgtggttgataattatttatatatttaagacgggatttggcgtatagtttattagtaataggcgttggtaatttttagttgtttttttgttgcggcgtagatattatttaaggtgggatggagagagttattgtttttaaggttatatattttaaagggagatgttgggttacggaatgaaaataggaggattagttagagttattggttttgagttatataatgggatatataggtttatttattttatatttttattgagtaattataacgagttaagttgtatagattatttaaataatcggtacgtagaaaagtattttaatttttttttggttttgacgtgatgggaagaatttggatttttggagttatagagttggatggaaattttggtttagttaattattggttgggggagttcgggtaagtgatttaaggtttttgagtttgtttttttgtaaaagagtagtgttcgggtttgttacgttaggttagggtaagatgattgaagagtaagcgtttagtatcggttaggggttaacgtttttaaggacgtaaagtgtaataagtaggcgttacgattgtatcgttttttattgtttgtggtaaatatataagtaaagatggtttcgcgtttgcgttgggggaggtagggaattggttttaggaggacgttggtttttttagttgttttttttaaagttttttgggaggagaaatgatttattttagttgttgggagttttaatttataagtaggtttgtttattcggtagcggtcgtatgtaggtaggaggggtttcggtagtttttaagagtgaggggtcgtttagtttttttttagttggaaaggaggttttaggttgggtaggagtatttggggaaatttagtttttggagttaggttatattagggagatgaggttgttagaagtttttttggtgtttatagtaaaatataattaaagtgggatttagattttaattagtttaaggtttgatttatattagagggaaattagcgtttgtcgtatgagtgagcgtttatgtgcgtgtaaggtagagatagattttgggtaagtttttttatttttttacgtttgtttttttatttataaaacggggtaatattatttattttatagggttgttatgaaataaatatgtattaatatttgtaaagtgttgagaatagtatttggtataaaataagagcgatagatttgttaaataagtaaaaaataagatataagtttaaagtagagtttggtatatcgtgagtattaagagttgtgttttttgattttttttttttgtggagatttttttattagaagtgggagggattgtcgaggttggagttttgttttagggatttttgtggggagttttttagtttagagggatttgttttacggattatatttgtttcgggttttcgtgtttttgtgtatgtgtgtatatatgtgtgtatatatatgtaatgtgcgtgtgtgtatttttatggatttgtgataatttgtatatatatgtttagaatttatttgatatagtgttttattaagatgttggagtttcgatgaatggattgcggggttgagatattgtttttataggaagttgttttagtagtaagttttttggtttttatagataattaaaaagaatggagtttgtttttattttttgttttaaaaatgatgtatagtgtgtggggtttgatgttggaggtttttttagtagatatatttttaataatattatattttgaaatttaagttgtcgtaaaataagataagtaaagatggtattggtagggatttttgaggttttttttatgtatttttgaataatttttatatggtttttgtttgaatgtttttaggtatggggaatttattattttgtgaaatagtttgttttatcgtttttaagtgaatattgtgagaaaaatatttttttttgtaaagagttaagttttattcgttagtattttttaggtatttggtattagttttatattttgggggaatttaaaataaatgttttttttttattagataatttattaattatttggagatagtggttgtagttttttgttttatgtagttattttatttagtttttttttggaatttttgacgtgaatataagtttttttgttacgtaggttttttttttgggttttttatttatttgcgtatattttggagaggtcgttcgttttgtgggtgagatttattgtgggttgaattgtgtttttttaaaagatatatgtaagttttgattttttagtatttatgaatgtgattttatatggatatagggtttttgaagatgtaattgggttatttgagggtatattgaattagagtgggttttaaatttaatgataggtgtttttataagatagaggtaggttgggtatagtagtttatgtttttaattttagtgttttgggaggtaaagttttattgtttgagcgtaggagtttgagattagtttgggttttcgtttttataaaaaaattaaaaaattagttaggtatggtggcgtgcgtttgtgttttagttatttggaaggttgaggtgggaggattgtttgagtttgggaggttgaggttgtagtgagttatgattacgttattgtattttagtttggaggatagaatgagaatttgtttttaaaaataaattaaaaagataatagagagggtagtttggatagagatataagaagagatatagggtgaaggttaggtggggggtaggtcgagttgtaagtcgaggaatattaggggttgttggtcgtcgtagagttcggagaaaggtatgggatagtttttttcggaatttttaggaggaatgaatttttagatatttcggtttgggatttttggttttagaaattttagggaagatatttcggatgtttttgtttttgtttttgtttttgtttttgagacggagttttgttttgttatttaggttggagtgtaatggcgcgatttcggtttattgtaatttttatttttaaggtttatgttatttttttgttttagttttttgagtagttgggattataggtatttattattacgttcggttaattttttttttttttttgtatttttagtagagacggggttttattatgttagttaggatggtttcgattttttgatttcgtgatttaatcgtttcggttttttaaagtgttgggattataggtatgagttatcgtacgtggtcgatttcggatgttttgagttattttatttgtggttttttgttatgatagtcgtaggatagtaatatagggttttagtagggtggttcggtaagggttttttttttacggtagtttttattttgttttatttgtagggttatttagatgtttatttcggttttggttagtaagtgttagtgtatttttttacgtttagtagtaagggtagtatcgttgttgattaagtatttgttatgtcggggtttttgtgtggttttggggttttttttttttgtttatatttggtagtttagtttttttttttgtattttatttgatgtcggggttttgggtaagtttgggggatttgtgttttattttatagattttttagttgattttattagtttttgtatagggttcgtttgaagggtcgttgggttgggcgttaattagagtttttagtagtagttttttcggttttttgattttggtttatgttttaggggtagggtttttaagggttttggggtcgtttttgaggttagtttttttgttgatcgtagtttatatagaggagggtttaattttgagtgtggtcgttcgtgattttgagagatgtttagagttgtagacgtgttttttaagttttttagagttcgggataggagttatttaatgtttttagtgttataggtaaaatttgttttttttaatataaattgtttttagttttatttaatgttttttttaacgagtagtaataaaaatatggttttttgttaaaggtggggtttatagttttttagaattcggttttttgttaggtttaggtataatttataggagtgttcgtttttgattcgtgtgtgtgtgtgtgtgtgtgtgtgtgtgtgtgtgtgtgtgttgtgtgtacgcgtatatgtgtttgcgtaagtttttttatgtgtagttttgggaagggtggagaggtttacggaaattttttttggtatttagtaagttagaaaaaaggaaaatgagatttgtgtatatatgtgtaagtgtatatatagtatataggtatatatatatatatatttagtatatattatataggtttatacgtgtatatatgtgtaggtatatattatataggtttatacgtgtatatatatgggggtatatagtatataggtatatataggtatatatatttttttgtaggaaagtttttttttgttttttattttgtagggtttttaggttttatgaaataagattgaattttggaagtttgataaaaggtttgtttggagtattttggttatttttattagtttttttagttgtggaaggtatgtttcgtggtatttatttattttttgtttttatttttattttcgttttcgtttttttttttttgtttttttagtttatatgttgtttgttttaattttaatttttgtatttggacgggaattattttttttgtagaagggtgtaatgtatgtggggatatatatatatatatatatatatatattgtattggaggagagaagagaggtagagttttttttagatttagagttttagcgagtgacgggattttttttagagaatacgtgtagaagtttgcgttattggaagaagatattattttgatttatatttttttttttttttttcgttttttttatagagaaggaaaggttttagtaaatagtggttatgtgggttttttgtatgttattggtagttttttagttaggattattttttttttatttttggaagtataagaatagagagaagggtgagtttttgtttttgggggtttttttttgtatttttttggagttaattttagggttgtgggttgtataggaaggagggtttaataggtttttcgtttaattttgtttttttagtgaggagtcgatttattttgtttgtaaaagatgttggttgggatttgatgttgggtaatttgaggagaagagaagggggataggggttgaggttaggtttttggttttgaaatagttataatttttggggtagagtttaagggtgttaggttggagattttatattcggttagttggtagttattattttggtttagttagtggtttagggtattatagttatttagattaggaattttatttttttggattgtattaatgaggaaggttgagtttgtaggttttatatatttatggtaattttaaggtagagaggttattgttaattgagggttacgggtaggagttttgtgagtttattagtaagtttggaagattaaggtttttggttatagagagtagttgttatttggttaattttgtagaaaatattatagttttggataaaatatttgaaagaataaaataataatagtttggagttagtatagaatattttaagtaggtagaagttggagtagagtttatatttgatagaggggaataaaattagataagtttttggtttttggaggtttttttgtttagaggtaggtattgagtaattaaatttggataaaaagttttaaaagtatttagggaaaaataatatgtggtttataggggaatagttagatgaatgttgattttttgatagaaataacggaggttaaagatattggaattttatattttaaagttttgaaagaaaaaattgataatttagaattttataattagtgaaattatggtttaagaatgatagtaggttgggtatagtggtttatatttataattttagtattttaggaggttaaagtaggtagattatttgaggttaggagttcgagattagtttggttattatggtgaaattttatttttattaaaaatataaaaattagttgggtatgatggtatatgtttgtagttttagttatttgggaggttgaggtaggagaatcgtttgagttcgggaggagaaggttggtgagttgagattgggtaggagttttgaaattatattattgtattgtagtttgtggggagatagagtgagattttgttttaaaaataaaaataaaaataaaaaaagaaagaatgatagtaaaataaagatttgtagataagtgaaaatgaaagggaattagttgtttgtaaatttgtattataaaaatcgtgaagtaagttttttaagattatgggaaatgagattagatgggaatttagttttttaggaaggaatgaagagtataggatatagtaaatatatgggtaaatagaaaagattttgttttatttttaatttttttaaaatgtatggggttgtttaaagtaaaaatttttttattgtattgtttagtttataatgtgtatggatgtagtaaatatttaataattattatatataggatggaaagtggtaaatgaatttataggattgtttagtttttatattttttttttatgaagaaaaataatgttaattttaagtagattgtgaaaagttaagaatgtgtaatagaatttataaagtaattattaaaatagtaatataaagagatataattaaaaagttaaaataggtcgggtttagtggtttacgtttgtaattttagtattttgggaggttagggtgggcggatcgtttgaggttaggagttcgaggttagtttggttagtatggtgaaatttcgtttttattaaaaatataaaaattagtcggtcgtggtggtaggcgtttgtaattttagtatattagggaagttgaggtaggagaattatttgaatttaggaggtagaggttgtagtgagttaagattatgttattgtattttagtttgggtaatagagtgagattttgttttaaaaaaaaaaaaaaaaaaaaaatataaattaaaatagaattttaaaaaatatttaattaatataaaagaagttaagaaagtaagatgaaagaaataaatattaaagagtaaggtagtagttttaaatttagttatatttataattatgttaaatagaaatagtttgaatattttaattaaaaggcggaggttgttagaatgaataaaatagtaagatttaattatatattatttataaaagatgttgttttagtataaatataggttgaaattttttgtttggaaaaagatatattgatgttgtttgaatgatgatggagttatgttttgataaatttattataagtggaaaataaatattattttaaaaatgtatttaatatatttaatttatcgaatattttagtttagtttagtttattttaatatgattagaatatttattttagtttatagttgagtaaaattaataaatataaagtttattttataataaagtgttgattattttatgtaagttattgaatattgtattgaaagtgagaaatataatggttttatatatatttaaagtatagtttttattgtatatatattacgttcgtattatggtaaagttgaaaaattgtaagttaaattattataagtttttttataagtttttttagtttttttatgtattttaaatagtatgtttaagaaggttggagaggttatataaatattaataaagttgagtttaagataaaattattacgagataaaggaatatatttattatggttaaatgattagtttatcgagatattattataattataaatgtgtatgtatttaattaaaggagttttaaaatatatgatataaaatttgaaagaattaaagggagaaatgggtaattttataattataggtggagattttttttttttttttttgagacggagttttatttttgttgtttaggttggagtataatggtgtaatttcggtttattgtaatttttattttttgggtttaagcgatttttttgttttagtttttcgagtagttgggattataggagtttgttattacgtttagttaatttttgtatttttagtagagataaggttttattatgttgtttaggttggttttaaatttttgattttaggtgatttattcgttttggttttttgaagtgttgggattataggtgtgagttattgcgtttggatgtatagttggagattttaatattattttagtttatttaggatgttaaaataaaatgttttaggttgggtaatttataaatagattgtagtgtttatagttttagaggttgggaagtttaaaattagggtgtttagtgtttggtgagagttagttttttgttttagagatgttttttttttgttgtgtttttatatggtagaagggattaattttatttacgatgattttgtttttatgagttaatatttttttgatgttttaatttttaatattattgtattagagattaagttttaatatatgaattttgggggatataaataggtaggttatagtaaatattatttttttaatatttgagaaataagtattagataatttgaagaatattggtaattagtaattgatttaattagtagttataaagttttatatttaggaagtttagaatatatatatatattttttttttaagtgaaaatagtgtatttattaagatatatattttgggttataagttttaaattttaaaagtatgtaaaatatgtttgtttggttaaagtaagattaaattagaaattaatagttttaagatatttagaggagttttgattatttgtaaattaaataatatatttttaaataatttatgagttaaagaggaaattataagaaaaattttataatattttaaatgaaatgataatgaaaatatagtatattaaaatacgtaggttgaagttagtgtttagagggaaattgtaagtgtttatattagaaaagaagtaaaaaaaaaaaaaaaaaaaaaaaaaaaaagatttaaggatttgttttaagaatttggaaaaatgggttaggtgtagtgtagtttacgtttgtaattttagtattttgggaggttaaggtaggtggattatttgagattaggagtttaagattagtttggttaatatggtgaaattttgtttttattaaaaatataaaaattagttgggtatggtgggtatttttagttatttagaaggttgaggtaggagaatggtttgaattcgggaggtggaggttgtagtgagtttagattatgttattgtattttagtttgggtaatagagtaggatgtttttttaaaataaaataaaataaaataaaataaaataaaataataaaaaaaataaagaatttggaaaaatatgttagttatttatgtattgttttttaattttgtatatattttgttaggtttcgtttcgtgatattggatcgaggttttatgagtttttttttttggttaaatatagttatgttaggttttatttataggggataatattgtggggagttgttaggttttgttgaggtagtagtttttttttttggttttagggttttttttttttttgaaggtatagttgttagtggcgtgtgtttagtggggtttgttttgtattgagtttttttagtattttagttttagtttaatgggattttagtaaattttttagatatttagtttttgtttatttatattttttagtaggtttttcggttatttagtaagttgattttgtagatttattttttttatattttttggtaagaatttttttgttattagtaggttgtaggtttttgtggtagttatatattttttaataaggtttgaacgtaagacgtggtaaggtgtggaggacgtttcgagtttttggttttttttttattaattttagtggtagtaattgtttttgtgtgtttgtatatatgttttaaagtatttattatagaaaatttattattttaattatttttaggtgtgtagtttggtggtatgaagtatatttatattgttgtgtaattattattattatttattttatttttttaaattgtaattttatttttattaaatattaattttttatttattttttttttttttagtttttggtaatttttattttattttttgtttttttgaatttgattattttagggattttataaaagtgaaattatatagtatttgtttttttatgtttggtttttgttatttagtatgtttttaaggtttatttatgttatagtatgtgttagaattttttttttttttttttttttttttttttttgaggtagttttgttttgtcgtttaagttggagtgtagtggtatggtttcggtttattgtaatttttatttttttagtttaagcgatttttttgttttagtttttttagtagttgggattataggtatatgtttttatgtttggttaatttttgtatttttagtagagatagggtttcgttatgttggttaggttagttttaaatttttgattttaagtgatttgtttatttcggttttttaaagcgttgggattataggcgtgagttattatatttggttttttttttttttttaaggtagaataatattttattgtatagatggattatattttgtttgtttatttattcgttggtggatatttgggttgtttgtattttttggttatgggaaaagtgttgttataaataagaatgtagtatatttgtttaagtttttgttgttagttttttggagtatatatttagaagtggaattattggatgttatggttattttgagtttaattttttgagtaattgttatattttttttatagtagttgtattattttatatttttattagtagtgtacggggttttaatttttttatatttttgttaatatttgttgttatttatgttttggttaatagttattttaaagggtgtgaaattatattttattgtggttttgatttttatttttttgatgattagtgatattgcgtatttttttttgtgttttttggttattggtatgttttttgtggaaaaatgtttgtttattgggttgtttttttttgttttgtggtttagttgtaggagttttttatatattttggatattagttttttatcggatatacgatttttaaatatttttttttattttgtggattttttttttacgttattggtagtattttttgatgtataaaagttttaagttttggtgaagtttaatttattatttattttttttgttgtattttcggtgttatatttaagaaagtattgttaattttaatgttacgaagttttttttttatgtttttttttaaagtagttgttttttatatttgttttttttatattttttagagtttttttgtataaggtaaaataaattttatttttttatttttatttataatatttagtgttttagttttgatattagatgtgtggttttttttcgtcgatttttaagtaattttttaatatttagtagtttttaattgggtgttttgtaatttagtttaattttgatattaattagagttagtgtagattttataggttaagggttttattttataagattgtttttaattttagagattagtcgtaagtggtaagatattaggttatttataatttttgtttgatttggttataaatttgaggtttttataattttttttttaggtttaataatttgtttgagtgatttatagaatttaggaaattagtttatttaaaattgttgatttattataaatgatattttaaaggatataaatgaatagttaattggaagagatgtataagaaaggtatgaaggaagcggtatggagtttttacgggagggtatattgtttttttagtatttgtaggtatttaataatttgaaattttataaattttatttttttgggtttttagggaggttttattatataagtatgatatgaaatttttggttattgatgattaatttaatttttatttttttttgtttcgtaggaggtggatgggaaaggttgtaagttttagttttttaattataaggttgggttttttggtaattagtttttatttttaggttgtttaggagtttttagttattagtcgtttttttagtaaataaaaagatatttattattttggagattttaagagttttaggagttatatgttaaataaagttgggggatagagattagatagatagatagatagatagatagatagatagatagatagatagatagatagatatattgatttttgagatagagtttttttttgttatttaggttggagtgtagtagtgtaatttcggtttattataacgtttgttttttcgggtttaaattatttttttattttaattttttaagtagttggaatcgtaggtatatatcgttacgttaggataattttttgtatttttggtagatatgaggttttattatgttgtttaggttggttttaaatttttgagtttaagggattcgtttgttttagttttttaaagtgttgggattataaatatgagttattgtatcgagtttagtttaaatatattttttttatattataatgttatttttttgtgatttttttaatagttaattattttttatagttaagaatattttatattataagttgttatttaaattgtcggtgtggtttttgttttttgattgggttttgattaatgcgttgaagtaagtataaggaaggaagtaatgaagataatagagaaatttaaggaaatggatattagaaaaggggagtttaatgttggttttttaaaaagatttagattgataattttttagttaggttgttgatgagagggagatggcgaatataaagttataataaaaggaatgaagtgttttttttacggattttatcgatattatagtgataaggaatataggtatattttattttattgtgttttatagatattgtattttttataaattgaaggttcgtggtagttttgtattaagtaagtttgttggtattatttttttaataatatgttaatattgtgtttttgtgtaggagtttgatgatttttgaaatagtttaaatttttttattattattatatttgttatggtgatttgtgatttttttttttttttttttttttttgtttttttttttttgagatagagttttgttttgtttggagtgtagcggcgcgatttcggtttattgtaagtttcgtttttcgggtttacgttatttttttgttttagtttttcgagtagttgggattataggtatttattattacgttcggttatttttttcgtatttttagtagagacggggttttatcgtgttagttaggatggttttaattttttgattttatgatttgttcgtttcggttttttaaagtgttgggattataggcgtgagttattgcgttcggttttttttttttttttttgagatggagtttcgttttgttgtttaggttggagtgtagtggagtgtagtggtgtgatttcggtttattgtaatttttattttttaggtttaagcgatttttttgttttagtttttttagtagttgggattataggtattcgttattacgtttggttaattttggtatttttagtagagacgaggttttattatgttggttaggttggttttaaatttttgattttaggtgatttatttgtttcggttttttaaagtgttgggattataggtatgggttatcgcgtttagtgattagtgatttttaatgttattattgtagttgtttttggggtatgacgagttatatttagataagatagtgaatttatttaataaacgttgtatgttttgattgttttattgattggttgtttttcgttttttttttttttgtttaggtatttttattttttgagatttaataatattgaaattaggttaattaataattttataatggtttttaagtgtttaagtgaaaggaagagttattcgttttttattttaaattaaaagttagaaatgattaagttgagtgaggaaggcgtgtcgaaagttaagataggtaaaagtgagattttttatgttaaatagttagttaagttgtgaatgttaagaaaaagttattgaaagaaattaaaagtgcgattttagtgtatatatgaagaagaagaaagtaaaatagttttaatgttgatatgaagaaagtttgagtggtttggatagaagattaaattagttataatatttttttaaataaaagtttaatttagggtaaagttttaattttttttaatggtatgaaggttaagagaagtgaggaagttggagaaggaaagtttgaggttagtagaggttaggttatgaagtttaaggaaagaagttatttttataatgtaaaagtgtaaggtgaagtagtaggtgttgatggagaagcggtagtaagttatttagaagatttagtttagagtattgatgaaggtggttatattaagtaatagaattttagtatagatgttttattttttattggaagaagatgttatttaggatttttatagttagaggggagaagttaatgtttgtttttaaagttttaaaggataggttgatttttatgagaggttaacgtagttgttgatcgtaagttaaagttaatatttattgatcgttttaaaaattttagggtttttaagaattttgttaaatttattttgtttatgttttagaaatggaataataggttttatttgatagtatatttgtttatagtatggtttattgaatattaaaaatttattgaggtttggtgcggtaatttacgtttgtaattttagtatttttgaaggttggggcggggggattatttgaggttaggagttcgagattagtttggttaatatggtgaaatcgtatttttattaaaaatataaaaattatttaggtatggtgttatacgtttgtaattttagttatttgggaggttgaggtaggagaatcgtttgagtttaggaggcggaggttgtagtgagtcgagatcgtgttattgtattttagtttgggtaatagagggagattttgttttaatttgaaaaaaaataaaaaaataaaaaagggttaagtacggtggtttatagttgtaattttagtattttgggaggttaaggtaggtaaattatttgagtttaggagtttaagattagtttggttaatatggtggtgaaattttatttttattaaaaatataaaaattagttaggtatggtagtgtatatttgtagttttagttatttaggaggttgaggtaggagaattatttgaatttgggaggcggaggttgcggtgagttgagatagcgttgttgtattttagtttaggtaataaagcgagattttgttttaattaaaaaataataataaaaaaaaaataaatagggttcggtgtagtggtttatgtttgtagttttaatgttttgagaggttgaggtaggtggattatttgaggttaggagttcgagattagtttggttaatatggtgaaattttgtttttataaaaaatataaaaattagttaagtatggtggtgtgtgtttgtaattttaattatttaggaggttgaggtataagaattatttgaattcgggaggtagaggttataatgagtcgagattatgttatcgtattttattttgggtgatatagcgagattttattaaaaaaaaaaaaaaattattgagatttattgtttaggaaaaaagaatttttttaaaatattattgtttattgataatgtattttgtgatttaagagttttgacggagatgtatgtaaagatgaatgttgtttttatgtttgttaatgtaatatttattttgtagtttatggagaagggataaatttgatttttaagttttattatttaagaaatatattttataaagtagtatttgttatagttagtgatttttttaatggatttgggtaaagtaaattgaaaattttttggaaaggattttttattttagatgttattaagaatatttgtgatttataagaagaggttgaaatattaatattaataggagtttggaagaagttgattttaatttttatggatgagcggtttaagattttagtagaggaagttattgtagatgtggtggaaatagtagagaattagaattagaagtggagtttggagatgggattggattgttgtaattttatgattaaatttgaatagatgaggagttgttttttatggatgagtagataaagtggtttttggagatgggatttattttaggcgaagatgttgtgaatattgttgaaatgataataaaagatttagaatattatattaatttatttgattaattcgtggttagggttgaaagaattgattttaattttgaaggaagttttattgtgggtaagatgttattaaatataatgcgtgttatagaaaaattttttatgaaagaaagagttaatttatgttaaaaattttagttaagaaattgtcggttaggtgtagtggtttacgtttgtaattttagtattttgggaggttaaggtaggtggattatttgaggttaggagtttgagattagtttggttaataaggtgaaattttgtttttattaaaaatataaaaattagttaggcgtggtggtaggtatttgtagttttagttattcgggaggttgaggtaggagaattgtttgaattcgggaggtagaggttgtagtgagttgaaatcgtgttattgtattttagtttgggtaatagagtaagattttgttttaaaaaaaaagaaaaagaaaaaagaaataaagaaattgttgttatagttatttttaatttttagtaattattatttggttagtagttattaatattgaggtagattttttattaagaaaaagattatggtttgttgaaggtttagatgattattagtattttttagtaaaaagatataatgattttatatattttaatagattatagtatagtgtaaatataattttttttttttttttttgagatggagtttcgttttgttatttagtttggagtatagtggtgtgattttagtttatcgtaatttttattttttaggttcgagtaatttttttattttagttttttaagtagttgggattataggtatgtgttattatatttagttaatttttgtatttttaatagagatgaggttttattatgttggttaggttgtttttaaatttttaattttaaatgattcgtttattttggttttttaaagggttaggattataggtatgagttattatgtttggtttaaatataatttttatatgtattgggaaattaaaaagtttgtgtgacgtgttttattgtaatatttgttttattgtcgaggtttggaagtaaattttaggtatgtttgtattacgaataattttaaatgagtaaatttaataatttatttgaaagggataaatttttttaaagtataatttattaaaagtaagataaggggaagtaaaaaaatttgaataattttttttatatattaaattgaatttgtgattaaaaataaataattattttttttagtagaaaattttaggtttagacggtttttttggtggattttattaaatatttaaggaagaaataatattaattttatgaaaatatagaaaataaagagaagggaatatttttaaattaattttatgaagttaaaatgaggttgataaagatattatcgaaataaattaataaataaagaaaatattatattaatattttttatgaattaatacgtaaaaatttttaaaaattgggtaaattaaatttagtaatatataaaaaggatgatattttataagtaagttggattttttttagaaatgtaaggttggtttaatattaaaaaattaggtttgtatagtggtttatatttgtaattttagtattttgggaggtagaggtgggagtattgtttaagtttaagaattgtagattagtttgagtaatataatgagattttatttgtataaaaaattttaaaaattaaaaattagtttggtatggtggtatgtgtttatagtttttgttatttaggaggttgaggtgggaggattgtttaagtttaggagtttaggttgtagtgagttacgatggtattattgtgttatagtttgggtaagagtgagattttgtttttttaaaaaaaaaaaaaaaaaaaacggggggtaaaaattaattattgtaatttattttattaaacgaataaaagataaaataatgattatttttatagatgtagaaaaagtatttattaaaattatatttatttatgttaaaaaattttagtaaattaagaatagaagggaatttttttaatttgataaaggttatatatgataaatttaaagttaatattataagtttggtataggtaaggatgtttattaattattattatttaatattgaattggtagttttaattagtgtaataaagtaagaaaaaaaaataaggtattaagattagaaagaagtaaaattatgtatttaaattttaaaagatttataaaattattattagagtaataaatgattttggaaaagattataggatataagatttatatataaaaatttattgtatttttatatattagtagtaaataattaaaaatgaaatttaaaatttattttagtttaaaatagtgttaaaagtaaaatttttaggaataaatttaataaatggtatgtaagattttttttttgaaaattataaaataatgtaattttgtagagatttttttttagtagagaaataaaagaaatataaaaggatttttaaaacggagatatattatttatataaaagatttaatattgttaaaatgttaatttttttttaattgatttatagatttaatataattttaattaaaatttatattgtatttttgtagatattaataagttattttttaaatttataaggaaatttaaaggatttagaatatttaaagtaatattttagatatttgagagattttatattaagatttattgtaaagttatattaattaagatgtggtattagtaaaggaatggataaaatattaagaaaatataatagtgttttaatatagggtttatatgtatatagtatatatattaatataggattatatatatagttaatataggatttatatgtatatagtatatatattaatataggattatatatatagttaatataggatttatatgtatatatgtatatatattaatataggattatatatatagttaatacggggtttatatgtatatatgtatatatattaatataggattatatatatatatatagttaatatagggtttatatgtatatatgtatatatattaatataggattatatatatagttaatatagggtttatatgtatatatgtatatatattaatataggattatatatatagttaatatagggtttatatgtatatatgtatatatattaatataggattatatatatagttaatatagggtttatatgtatatatgtatatatattaatataggattatatatatagttaatatggggtttatatgtatatatgtatatatattaatataggattatatatatagttaatatagggtttatatgtatatatgtatatatattaatataggattatatatatagttaatatagggtttatatgtatatatgtatatatattaatataagattatatatatagttaatatggggtttatatgtatatatgtatatatattaatataggattatatatatagttaatacggggtttatatgtatatatgtatatatattaatataggattatatatatagttaatatggggtttatatgtatatatgtatatatattaatataggattatatatatagttaatacggggtttatatgtatatatgtatatatattaatataggattatatatatagttaatatagggtttatatgtataaatgtatatatattaatataggattatatatatagttaatatagggtttatatgtatatatgtatatatattaatataggattatatatatagttaatatagggttgatatgtatatattaatataggattatatatatagttaatatagggttaatatgtatatacgtatatatattaatataggattatatatatagttaatatagggtttatatgtatatacgtatatatattaatatagggttatatatatagttaatgatttttagtaaaggtgttaggtaatttaatagagtaaggtatgtttttttaataaacggtgttagaattggatatgagtatagaaaaataagaattaattttgattttaaattaaatataaaaattgatttaaaatggattatataatattttgacggttataataggttaaaaaatgtaaaaatttaaaaaattaaaaaataaaaggaattatagaatatataattataaaatttttagaaaataagagaattttttttgattttagtgtaggtaaagattttttttataggttataaaaattataaatcgaaattggaaaaagttgataaattggattttatgaaaataaaatatttttgtttattaaataatattattaagaaaattaaaaggaaaggagtaatgtggaaaaaaaaatttatgatatatatatttgataaaggatttatatttagaatatataaaaaatatatgaaataatatttttttttttttttttttttgagatagagttttgttttgttatttaggttggagtgtagtggtgtaatttcggtttattgtaagtttcgttttttaggtttatattatttttttgtttcggtttttcgattatttgggattataggcgttcgttattacgttcggttaattttttgtatttttagtagagatggggttttatcgtgttagttaggatggttttgattttttgatttcgtgatttgttcgtttcggttttttaaagtgttgggattataggcgtgagttattgtgttcggttaattttttttttaaatgagatttatggggaaatagttaaatgaagaaataataaagtagtaataaaataaaatttaagttttattttattgtgtagttgtaggataaagagtagaagtttgtagttggggaataaggtgtttatttttttaagtattataaaatgaaggttttagaaattattcgattttgaaataatataattttaaaaagaagtaagacgtggatagataattttataaaggaaaatacgtaaatgattaataaggattttggaaaattgtgcgattttataagttattaagaaaatataaaataaaagttttaaaaaaaaatgaagtttggaataattgaataaatatataaaacgataataaaatgaattttgattttttattttatattatatgtaaaagttaatttataaaagttatataattttaagttttttaaaggaaaatataaatatttttgtaatttggtagggtaggtaaaggttttttataaagaatatagagagagaattataaagaaaggagtttgttaaattagattttataaaaattaaagtgatatatttttgtttattggaaaatattattaagaaaatgaataggtcgggtatggtggtttatgtttgtaaaatcggtttttggggaggtagaggtaggaggatagtttgagtttaggagttttagatttgtttgggtaatatagcgagattttgtttttgaaaaaggaaagaaaatgaataggtaagttatagattggaataaaatatttgtaaaatacgtatttgataaaagattagtatttagaagaaaaagttaagtaatttaattttaaaatgagtaatagatttgaaaagatattttataaaggaaaaatatatgaagagttaattatgaaaatgtgtttaatcgtattagttattaggttaaagtaaattaaagttataatgagatgatattattatacgtttattagaatgattaagattttatagagtgatagtattaaatgttggttaggatgtggagtaattagaattcgtatttattgttggtgggagtgtgaaatggaagggttattttgggaaaagatttggtagttttttataaaattaaatgtatatttattttatatttattttaggtgtttttatagaataaatgaacgtttatatgtatagaaaaatttgtataagaagaattagcgtaataggtttatttataagagtttttagatggaaatagttaggggttttttaataagagaatgattaaaaatttatagaatgtttatatagtggacgttatttagtaataaaatagaataaatcgttggtatttgtagtaatatgggtagttttaagaaatatttaaattggtaaaattatttcgtggtggaaaaaaagtataattgtggttgttttggggaaggtggggattgtgatgtatttggaggggtatgaggaatttattggggtgatagtgatgttttatgttttggttaggttgggatatacgtggatatttttgttaaaatttaaagaacggaacgttttatatttgtgtattttagggtatatatattttattttaaagaaaaataaaaataattatagataaatgtcggattttagttaatgaaatgtaaattgaggtgttgataggatgttgtgtgttgatttttgtagtttattttaagtgtattaaaattagcgtggatgttggtggttagagggatttgtggtgaagtaaatagtaaaatggttgttgtggaatttaggtggtaggtgtatgggtgtttattttagaattttttatggttttttttttgtggttttgttttgttttgtttttgagatagggttttgttttgtcgtttaggttggagtgtattggtataattttagtttattgtagttttaattttttaggtttaagtaatttttttattttaatttttcgagtagttgggattttaagtttgtattattatgtttgattaattttttgtattttttatagagatgggattttattatattgttcgggttggttttgaatttttgggtttaagtgatttttttattttaattttttaaagtgttgggattatagttatgagttattatatttagtttttttttattttttttatgtttgaaaagttttacggtaaaaagttggaaaaatgtaaaaaagattgaaatttattaattaaaaataggaaaaataaaataaaagagatggtaggagattattttttttttttttaatttagtttttaatttttttttttttcgtttagttaggataggaattttaagggttcgggtttttcgtgtttgtgcggggaaggaggtattttcgtgtttgtgcgggggttggttatttgtttttcggtgtattttttgtattttattttttttcgttcgtagtgagtagttatagttggcggaaattatatttaggtagtttttgtttataaatttagtgaaaatgtaaatttcgtaggagttggattttcgagagtttgcggcgttatttgttggaggaaaggttttttgtattcgagttttttttttttttttcgttgttattcgtttttttgtttaggttgggcgggttttttttttgtaatttcggggtattggtgtacgggaaatgtttagtgttttataatttttttttatttatattttaatatttagtttttagtggatatcgttttcgttcgataaatatattatataggtatagtttaagattatttattttaggaggagtataagttttagtgtttattattttagtttttttttttttttttttgacgtagtgatataggtttaggatattgaagatttttgattttataaatatgttgaagttaattattttgaagttgtagtttttattattattattattttttattttttgtaaagataaagttttgttatgttgtttagtttggtttggaatttttggatttaattgatttttttgtttcggttttttaaagttttgggattgtaggtgtgagttattgtatttagtttgaagtcgtagttttttaattattgttaatagtaatatttatttttttgtgagtagtagggtttgttggtatggttgatagttttgtattattgtatcgaatttgttgtttgggattttaggtgagtttcgatttttagttggagggataagttgtgtggggttgggtagggtgaattgcgggagattaagtttagattgagggttataagttatatgagtattggggttaggtagggatagtgaaggagatagtgtaattttgaggaaagataacgttatagaatggagaggtttaggttcggggtttttttttgttgtcggataggtatgtttgtgttttttttttagttttcgtgatggttaagttatgtgttttttgagaggtaagcgaggtttttgatagtaggttttaggttttaattaaattgtttgttttgtagggtgagttgtataggtgtttttattttcgatttttttgaatttttgttgtttttaagttttatttattttttttaggtgaatagaaatattgtttaggggagaacggaggaagaatttaggaaaggttgttcgagagtttggttgagtttacgttatcgttaagagtagcgttaaaatttaggagttggtgagattatggtttagggtttatattaatatgagggggtgttagttttatgattaatgagtttttgttttattattttttgttatttatattttgagggttatagttagtacgtgaattggagttggttttcggtatttttttttttatattagttttataatgtgaggtgggggttcgtttttagaggtattcggagtagtaggtgttttaagagggggaagttttttcgaagtttttttttatttacggtataggacgtagaggggatagagtattaggaatatttagcgattataggggtttgtttcgaaggagaggaggtaggaggtagggagagtggttgggaggttagttttggagtgtttattttttatttcgagggagaggaaggaagtagaaggtgagtatagggagttttagttggggatggagcgggggttgtagttcgattgtgttgtttggagcgggggtatggattgtagtttttatttatttgtttggttagttcgaagttattttaagtttggagattttatttgttttgtttattttttttagggatggtgtttaaatttcgaagttttggttggtgttgtaaatatgggagggaggttttgttttattttagttttaagagttagttaagaatgttttggatatttgaattttgtttcgagttagaggttgggaagaaatttgaaggatggtgggacggtggatagtagtttttaggtattaggtattagggtttttgtttggggatgggggtattagtaggtgttaagtgtattatattagggtttattatgtttttgtttagagatttagtattttacgaaataggaaggaacgagggatgagcgtgtttttttttttaatattttagtttttgttttgaggttgttaggtatttaatttttttaggatttaaattattttggttttatttacggttaagtgtattaaattatagttaggattattgggtttagatattaaaagcgttttttttaaagtcggtagttattagggtagtatagggtagtgtaaggttgggtagggtcggttatttgttagtatttagtggtttttgttggatgttgacgggggtagttaggtaggtgggtttatttagtaattaaagagattttttttttttaattttttttttaaagagattttgattttttttttttagttgtagggtttgtagtagttttttttttagtaggtttttttgtttgtttttggttatttttagtagttatagggtattgaggttttattatagtgagaataaaattaagtttttattagggtttttaaggttcggtacgatttggttttgtttgtcgtattggtgttattatggttcgtttttgaaaatatattttagttatttttattttttttaggttttagtttcgggtttttatatttgttgttttttttgttaggttgttttttttttggattttggtttggttgggtttttttggttattatagttttagtttagtgttattatttagaaagggtttttattaattttttcgttatatatatagatatgtatttttagtaatttgtttttagtttttttatagtttttatttaaaattatttatggatttgtttatttgtggattgttttttagttttaattgttaagtaataagcgattagcgattgtgtttttgttgttttttattataggttaagtatttaagagaggggttgtatatagtaggttttaataaatatttattagacgggttaggtacggtggtttatgtttgtaattttagtattttgggaggttaagttgggtggattatttgaggttaggagatcgggattagtttgattaatatggtgaaattttatttttattaaaaatataaaaattaattaggtatggtggcggacgtttgttattttagttatttgggaggttgaggtaggagaatcgtttgaatttgggaggcggaggttgtagtgaggcgagatggcgttattgtattttagtttgggtgacggagtgagatttcgtattaaataataataataaaatatttgttagaagaattaaagtagtttgtttgtgtttaataggaatttaagagtataagatgaatttaattaaaggatatatatagtaggtattttatagttgatatttgttggtggagggagattaggaaagtggggagaggtagtgtttgggtatggggatattttgggtatggggacgttttggatatagggatatattgggtacggggatattttgggtataggacgttttgggaacggggatattttgggtacggggatattttgggtatggggatgttttggatatagggatattttgggtacggggaaattttgggtatggggatgttttggatatagggatatattaggtacggggatattttgggtatggggatgttttggatatagggatatattgggtacggggaaattttgagtatcgggatgttttaggtacggggacgttttttgttatttgaaatttcgtagttttattatattcgtttgttttagtaaatcggtttaaagagtatttttaagtttttatggtaaagttttagagttagtgttttttcgttgatttcgagggtgtgttgtttatttagtgtttaagttagagtttttttatttagaaaaaaaaagaggagggtggttttacggatggaggtatgagggcgtttataggtagagggagttttcgggttgagatttgcgttattttttgttttaattttaaggcgtagtttggagtttaaattagtttttaaacgtgggtcgttggttaagaggaatttttttatttacgatttttttttatatttagtttttattgtttagagtatgttagttttgtttgttttggtttttaggatttttttagggatttttaggttttaagttagggtgggtttgaattaaggtagttttagaatttatgttaatgtttttgttagtgggagattttggggagtatcgtgcgggatgtatggggttaggcgggggtatatagcgagcggttttagaagttttggtcgttcggagtgggggggtgtttagagtaagagacgggttaggaagttggagtgagtaaggaggttttagtttttggtgggagtaggtcgggtaaaaataaattaatttgagggtagtagttagcgagattattataggaggggtggtggggtcggaggggttttaggagtttaggagagggaggtattgttagaggtaaggtcggtagatgagagttagtgttggtaggattaatttgttatagtagttatggtttattttttttttttttttttatatatgtttttggggtttatggaatttattagtttattataaaggatattataaaggatataggggaagagatgtgtagggtaaggtatgggggagggacgtagagtttttatgtgttttttaggcgttttattttttaggagtttttatatgtttatttatttagaagttttcggaattttatttttttgagtgtttacggaggttttattacgaaggtatgattgatttaattattggtcgttgatgatttgtttaatttttagttttttttttttatttggaggttgcggggtggtgttgaattttgtgattttatttggttttttttgggaattattttgaagttgttagttggtttgttaattatgagtatttaaaaagatattattttggagattttaaggattttaggagttgtgtgttaggaaatggagatgaaaattaagtgtatattttataatatgatagttagttttttttaattttagttttattttttgtcgtgttgtcggttttagtttttcgcgttttagggtttttgaatatattgtcggttgtttgtagcgatcgtttttgtttgttgggtttgagtttggtttattttttttatttttttgcgtttagttcgaaggtgttttttcgaggtagtttttttgatttggttttacgaatcgtaggttttgttttgttattggttttttttgttatatttgttattttttgtgttttacgtttattgatgtggttttgtatttgtgtagttttatgagggtaaggattgtgtttggttttgttttttacgggattttagcgttaagtttatagggagtatttaatgttgaatgaatgaatgagtgatcggtaagggaggtttattttgttatgttgggggttaaaggttgttgggcggattatatgggtgaggttgggtggggagggaagtagagatgattttttggaagaaggggtaggaggcggggaggtgggtgtggggtgttgtataaggatggtaagtgtttttaggggtgataagttaatttagagtattaggtagtagaaaaaggttgatatttttacgttttatttttatttagggagaggttaggttttcgggaaagttagtttttcgttgttaggagagttttaagggaagttttattagttgttgagttggttatagtggaaatttatgtggtgggtgggaggggtttgaggtataggggtttgggtggtggttttaggatggagatttgtgtttagattatgaggggtggttttagggatgattatttttaaataggaagtagataaaggtatagatggtagaagcggaggtagagaatgggttgtaggggtttttttagagggagagtcgagtaaggggataggttggaaatatttagtttttatggtttgaagtatagatagttggttttatacgtaggtcgggtagttatattatttagaataaggggtatgttcgtagggtaggttttaggacgtttcgggttggttttgttattagtttagaaagacggtttaggttttttcggtagggagtacgtttagttaggttttgggtaggagttgagattttttggttggtttgagaggggatgatcgagtgtaggtttagttcgggatttttttattttttttcgttatttagcggaattagttgggcgtgagaaaagaagagaagtgaattaagagtttagagtatgaggttggattagtttttatattatatgtaaaaattaatttaatttgtattaaagatttaaatttaagagttaaaattataaaatttttagaagaaaatataggggaaaagttttttgacgttgtatttggtaatgattttttggatatggcgttaaaagtataggtaatagaagaataaatagataaagtggaacgttatagaagtttaaaatatttgtatattagtttgggtgcggtgatttacgtttgtaatttcggtattttgggaggtcgagacgggtggattatttgaggttaggagttcgagattaatttagttaatatagtgaaatttcgtttttattaaaaatataaaaattagttgggtgtggtggcgggtgtttgtaattttaattatttaggaggttgaggtaggaaaatcgttggaattagggaggcggaggttgtagtgagttaagattatgttattgtattttagtttgggtaatagagttagattttattttaaaaaaaaaaaaaaaaattgtatattaaagggtattaataacgtggggagaaggtaatttatggaatggtagtaaattataggttagatatgggattagtatttggatattaatttatagattttttaatatttagtaataataattatttaaattaaatataggtaaaggatttggatagatatttttgtaagaatatgtgtaaatgagtaataaatacgaaaagatgtttaatattattaattattggggaattgtaaattaaaattataaggagagattttttataattatgagttttgggtaggtaggaagacgtttggtggggagttgtcggttttatgttgtttttagaatttttgtaggggttaagttcgatttcgatattttattaggagtatagaaacgagtggaaaaggttaaaggttattttaaagggttagaggggtttagtaaggagtttgggatatggaattatgttgtgtatttagatatacggggataatagggggatgaaaggtggtttttaaaatttatatttattttagagtttatgaatatggtttatttggaaaaagggtttttgtagacgttatgaagttaaggattttgagatgggattattttgggttatttagtgggttttaaattcgagaaagattgttcgtatgagagatagatagggggagatttagggtatagaaggaggtttcgtgataacggaggtagaggtcgagtggtgtggttacgagttaaggaacgttaagggtttcgggagtcgttagaagttgttagaggcgagaagtaggttttttttcggagttttcggaaagaattaggtttgttgatgtcgtgatttcggatttttggtttttagaacggcgagagaagaaatgtttggtgttttgagttatttagtttgtggtatttggtgatggtagttttaggaaattattatagggattagagtttttacggggttgggtaggaagcgggtgtagagcgcgttaggttaggttttttatttcggagatggaaaagtagagttggagaggttgagatcggataggtatcgagcgtttaggggtaagaatttttaggggatggtagaggttatcggggatagtatagcgagggataggagggaggggtgagggttgaggtatcgttttttaggaggtttcggtttttcgtttattgatgatttaggaatttcgtaagaggagttgggttttattttgtgtcgtattgtattagatggattttggtggggatagacgtttagcgatagcgtggttaagttttttttaggatttcgggtttgtatttatgattatgtatagacggttattttttttgtttgtagttttttttcgtggtttgtttttagttttttagtttaatagagttttttagtggaaagttttttttttggagattttttttttgttgaaatataagtttttggaataagataaaattgtttaatttgtaaaagttataaagtcgttttagaataaaaaaaaagtttcgatttttggttggaaggagtggttttttatgttttagcggttagttattattttatgatttatgtcggttttgttgataaattttttagtatttttttaggggaaggttatagtttttagggagggcgggagagtatttaggttttcgtttataaattagatcggagttagatattgtcgagggagggataagagggtaggttttggggtttttaagttttttttggggttggtagattatcgtggatttattagggtaggattatttttttttataaattttttttgggtagttgtagggtagtttgagttggatacgttttatacgttagtttagtggggtatgaggtatttatagttacgtttggaagttagcgggtcggtatttgtcgggtaggtttttgttatataggtatagcgttttttttatggtttttttttaggttagagtatgtttggggattagagtagttttcgtagtggtttgtagtttgataacgcggcgtgagttatgttttgtagagaagaagagttttttagtgagggaagaggcgtttataaaatttaggatacgcgtagaaattcgtaggaggtgggggcgttgtttaggggtcgtgtcgtttttattttttattttgtagatgacggaattgcggtttagagttgttaagtggtttgtttaaggttatttagtagggataggaaggaagttatttttttagggattgtgcgggagtttagtgataattaaagattagcgttaaagtttgtttaggacgagaattttattaagggaaatagtttcgggattgtcgtgtttattcggaaggtagttagtttataattgagtttttaaaaatgtacgtttttttatatgaaaatatattcgaatgggattttgtagaaagtattttttattaaggtatagttcgaggggaggttttcgttttatttttggttgtgttgtttttagttaagggtagtagggattagagtggtttttggggtatagtattggttgtttttaaagagtgttttgtttagtttatgaaaagttcgtgttttgtgagtttgggagggtgttattatttttagttttttagggagtattatttttaaatttacgtttttttgtttagtttttagattttttgttggttatttatttgggtttcggttagattatttataaagtgaaggtcgaattcgaggtttttcgaggtttttgttagttaggcgggtggagtgacgtttttttggggttggtggtttaggaggtaggggatttattgtggtttgtttaggttgtttggtggggtggttatttcgaggacggttttattgtgtaagtttgacgaaggttttttttagcgttttttgttttgcggtttttgttgggcggagagtaggacgttgggttttatatttattcgttttagcgggtttgagttttcgagtttaaatagataagatgtagttttattgttatttaagttttttgtcgttttttttggtttttttttgaggttcgtttgttgtgttcgattgggtgtgtttagcggtataatatatattcgttttattagttttaacgtgataattaagatgtggttttgaggtcgggcgtcgtggtttacgtttgtaattttagtattttgggaggttgaggcgggcggattacgagattaggagatcgagattattttggttgatacggtgaaattttatttttattaaaaatataaaaaaatatggcgggcgtttatagttttagttgtttgggaggttgaggtaggagaatggtatgaattagggaggcggagtttgtagtgagttgagatcgcgttattgtattttagtttgggtaatagagttagatttcgttttaaagaaaaaaaaaaaaaaagatgtggttttgggagtagtggtggaggggattatacgttttagagaggagttatcgagatgggttttttttttttaggttttttagggattttttaatatatatatagtggtaattaatagattagggtttaaggtacgtaggggttgatatttttagcgatttttcgttttatggttcgtaggttattttagaatatttaaagtttggagtttggtttagttattttatgttttttagcgttgggtttagagggcggtatgagcggtagaaattgttattattgttaattatcgatgacggcgttggttacgtgagatggtagttacggtatcgtatgtgagtgaagggattaaggaggttgggtttgggagggagggtttggaaagttggggtgaattaaaggtaggggagttttttttttttttatttgtttgtttacgttttgatgggtttgtgtttgcggtaagggggttgttagcgtgaatggatatacgtatatatatgtatatatacgtgtatatatacgttaggtttttttgagcgtcgggagtttttttttttataattaattgttaggaaggtatagaaatgttattttaggtaggagatcgaggtagttttgaagatagattttggttggaagtaaaaaataaattatatagtggataaattaattattagttaggtttaagcgtcgtcgttttagattcgagttaggggggtaggttttttatatttttttaaggtttcggcgttaatagttttagtattgatagtggttatgatatgtaagaatggtatattggaaaatgaaagggaagtagttaggagagaggagagtcgagtttaaataaaagttagatttaggagagtttagtttttgagacggagtttattttacgagtttggaatcgttaaaaagaaaagaaatatttttgtgaaaaatgagtaaaagcgttttttgtatgtttatttttttaggtataaataaagtttcgagtttagggtagtggggggcggtcgatggggagggggttgtttgcgtatttgagattcggtttttttttatttttacggatatatttagtagcggcgggagtttcggcgtttcgtttagaggcggtttttttttttttattttcgtcgtttttttttttttagttttttttttttttttttttttttttaaaaatattttttgtttggtttaatttttttaatttgttgtaattacgaatgtattcgaattattatatttttatgtgttgattatatgtttgtgttttaaattgaagtagtattgtttttttaaaacgggaggaaaaagggagtaaaggagagaaatttaaaaataggaggtaggagagagggttcgaagtgggtttcgaggagttcggtagattatcgggtttgtttgcgagagttttagagtttcggtcgttcggtttggtcggtggttgtagaggtttcgagtgcggttttcggtagttttttttttttattttttttagttttcgtcgtttcgaggtttgttgtttttttttaatatttatttggagatgtttaatttagatttttggaaattaatttatagagttaaatttttgacgatttttaaagttttttattttttttgtttcgcgatgttacgatttttttgggtttaagggtttaaaaagtttagtttttgcgtgtttgtttcgtttttttttgttttgggttggttttagtttttttttattttgtattttaacgtggttgggtaggaggaacggtcgtgttttaggttagcgtgttgagaaaaggtttcggagtatttgtttaggaggaattttgagaagttattttttttcgttttattagtttgtagtgatagaggtagttgtcgttttcgtttaggtagagagggcgaacgggacggggattttttggaagatttttattatatacgtatgagttagtgagtttttagtcgttttttgggagggagcgagttttttttttcgggaattcggggttttattgggggattagtgttgttttttattgtttattcggggtttttagaggttgtttatttatttggggggtttttattagtatatggttagggtttatgttgaggttaagggtttagtagagtaggtgggggtttataatgtgggtttttggggtgggaattaggggtattttttttgtttttaagttttattttaagggtttatttaaattcgagatacggaggttggttttgttggtttaagtttgtttaaagagaatgtgtgtttgtgttaaggttgagaatttaggtaatttttttgaaaattttagattgttagtttttgttgagaaagggaggacgcgtggtcgtattacggaagtttttttgtttggtcgtatagggttggtataagatagttttgttttttagataaaatattttttagtttgtgttgttttttaaggtttttaataaatttataatatttgtatttttttatttcgatatatttcgtaggtttttgagtttataatttttgttttatagagttaggtgagttatttgtgattaggtgaggtttatgtatagttttcggttagatgatagagttaaaggttttgaagtgttattttaggttatagtttcgttcgttttttgtttgggataggattttaaatgtaatttttttggtagaaaggatatttttttggggggtggggaggattatttttagttttttgggagatattaagtaattatttttttttaaagagtttggaggatagttttataggtagttagatagtgagggaggtggggatagtattttagtcgaggtgggaggttggggaggaagggagggattatagttacgagagaaggttgaataatggttttagggatagtatgttttaatttttagatttgtaaatgggattttgtttggaataagagtttttgtatttgtgatttagttgtagattttgttgtggcgagagtattttggatggtttaggtggtttttaaaggtagtttcggtgtttatataagacgggggtagagggagatttgatatagatagggatggttaagtggagatggggttcggagagatttgtagatgttggtgttgaaggtaagggttatgtagttataagttaagggatatttatagttattagaggtttaaaggggtaggcgatgaaggtagtggtttttaatttttttggtatttgggatcggttttagggaagataatttttttatagattagggagtggggagatggttttgagatgatttaagtgtattatatttattattttattttattttattttattgagatagagtttcgttttgttatttaggttggagtatagtggtattattttagtttattgtaattttcgttatttgggtttaagtaatttttttgttttagttttttaagaagttgggattatagacgtttgttatcgtgttcggttaatttttgtatttttagtagaaacggggttttattatattggttaggttgattttgaatttttgatttcgtgattcgttagttttggttttttaaagtgttgggattataggtataagttattgtgtttggtttttattttttattttttgagatagagttttattttgggattataggtgtgagttattgtattcggttataagtacgttgtattgattgtgtattttatttttattattattataatatataatgagataattatataatttattataatgtagaattagttggagttttgagtttatttttttgtaattagacggttttatttggtggtgatgggagacggtgatagattattaggtattagatttttataagaagtacgtaatttagattttttatatgtgtcgtttataatacggtttatttttttataagaatttaatgttatggttgattagataggaggtagagtttgggtagtaatgcgagtaatggggagtgattgtaaatatagatgaagtttcgttcgtttgttagttatttattttttgttgtgtaggttagtttttaataggatatacggggttgggaatttttgttttagagtttttagagggttatgtttagtggatattttgattttagtttggtgattttgatttcggatgtgtggtttgtagagttgtgagaggatggttgggcgttgttgtgatttagttagtttgtggttattcgttatagtagttgtaggaaattgatgtagcgttatagacggagttagggtttagtttattggagttgttttttgttattttatttttttttaaaatattgtgttaagttaattattaataattattgatttcgatgggtaggaatcgtagaggttttttggtttgtttttttaattttttttttaattttgaaataatattttttgttggtttttttgattataaatgtaatatttttttttgtattgagtttagaaataagagaaaaagtaaaaagtagaaattttagttgggtaaggtggtacgtgtttgtaattttagtattttgggaggttgcggcggaaggattgtttgaagttaggagttcgaggttgttgtgagttataattgtattattgtattttggttgggtaaaaagagtgagattttgttttaaattaaaaaaaaaaaaaaagaagaggaagaaaatttattaattttattcgagattttttatacgaatttttgttgtggggtagggaagtttaggaaggttttacgaggttttgatttagtttggttggcggtgggaatttgggaatagtttcgagtgaggggtcgggttatgattgagtttatttatttagttattttttgtacgttgtgtatattatgggtttgacggttagggttggagtatttgttgagtatagttttgatttttagttttatttagtatggtttggtttgaggtttatttttttttcgtgtttgaaaatttaaatattttggtttaggcgggggattatttgaaatggaaaatttggtagtatcgattggttttgaagaggtaggagttagttatgagtcggttgggaggcgagtgtagaggtggtgaggtaaggttagtagagggtgggggaggcgagggttaattttttatcgcgtatggtgtaagtattaagggggtattttattaggttagtgtagatttaggtttttgcggtggatttttcgcggtttttttttttagaggaatattgaagaggtttttgtggttttgttttagatttagaggtatatttgtatattaaacgtattgagtaattttatagtgagggagtcgggtttggtttaatttatttttttttaaattggattaaaggttgttgttttaggaaggtagggtttttaggtttacggttttgggaaattttggttgtgttagtttatgagtttagtttttagttattttagtttgtttatattttggagtgggtattgttatttaaaagttttttttagatagtttttagggcggtatttttgttttttattttttatagatttttggttatttttttgcgatattagtattattggtttatagttttttttaattgtaaagtggggtttagcggtataggttgggtttggtagggcgggaaggaagagcgaaggttattttgtttttaatagtattggtcgggttttggaaaggtcggaatttatagataggaaggaagtgttatatttatttaatttgttttgcgttagttagggggtattttgtagaaagaagttaggtggtcgtggtcgggtgtagtggtttatgtttgtaattttagtattttgggaggtcgaggtaggtggattataaggttaggggttttagattagtttgattaatatggtgaaatttcgtttttattaaaaatataaaaattagttgggtatggtggcgtatgtttgtaattttagttatttagaaggttgaggtaggagaattgtttgaatttgggaggtggaggttgtagtgagtttagattacgttattgtattttagtttgggcgatagcgcgagattttattttaaaaaaaaaaaaaagaagttaggtggttattttttagtttttggtttggtttaggaattgttttttttttaagatgttattaaatgttttttttattaggaagttttttttggttgttttttttatttttgtttttgttttagaatacggttcggtttttacggataattttgatattagagtttaatagagatttttttttttatggaaatttatattttaaattgaatatgtgtgtaggataagtttttgtttttatgtgaaataaaagtgaaaggtgcggattatttgtttttttttatttttttttataataatttgggttttataggggtttagtaggagttaggtttagtttagtcgttttaggtgtattattttgggtattagcgtttttgtttttttttacgaagtatagttttattttttggtatttagtggggaggggatatatattaggtattttttagggtggattgtgttttttatattaggttaggaggttttggggttggtttagttatttagaaaagggagtaggcggtttaggtgatattgatgtgggtagtaggggttttcgggaaagggttttcgtaggatcggttttattttgttttaggagtatatattggggaagggtgttgcgcggaggtggagagaacgtatttttggttgaaagtatgttttttgatgttttgggttcggatttgttgttattttttatgtttttttatttaatatacgttttagtaaattttttatgttgatgagcgttaagttatagaggacgtataatttttcgttttaaaaagtgattttttttgttgggtgtggtggtttatatttgtaattttaatattttgggaggttaaagtgggaggattatttgaggttaagagtttaagattagtttgggtaatatagagaaattttatttttataaaaaaaaaaaaaaaaaaaaaaagtttaggtatagtggtttatgtttgtaattttagttatttgggaggttgaggtaggagaattatttgaatttgggaggtagagattgtagtgagttaagattatgttattgtattttagtttgggtaatagagtaagattttattttaaaaaaaaaaaaaatttttttttttgaaatagggttttattttttttgtttaggttggaggatagtgacgtgattataatttattgtagttttagtttttcgggtagttggaattatagggttgtattattacgtttagttaattttttgtatttttagttaagacggggtttcgttatgttgtttaggttggtttggagtatttgagtttaagtgatttttttatttcggttttaaaagtattgggattataggtatgggttattatgtttagtttgaaaatattttttttaagaattagttagttatggtggcgtataattgtagttttagttatttaggaggttaaggtaggaggattttttgagtttggtaggttgaggttgtagtgagttataattgtgttattgtattttagtttgggggatagagaaagattttgtttagaaagaaaaaagaaaaaaaaaagatttttttatttattttttgtttatttttagatttaattattgaagtttgtttttttgaattaaaaatgaaggagtttcgttttggatttttttttgttgattttgttattgtatttgttagtagagttagttaagattttttaggttggttttagtttggttcgtttatagttttttaagtaagacggatttttaggttgaggttagttgtatttttttttggaatttttttttattttttattgtgttttagattttggttgtttttaaataaatataatttagttatttttgtttttggggtcgttgtagggtttattggtgtaaatcgtttgggtaggtttgttgttttaggagtttttttaggttagcgtggaaggaaattaagataacggggagaagtagttcggttgggtttaattttatttttatatgttcgtgtttagttaattatttgggttgtagtttgataggagttggagttggcgttttatttttagagggggttttcgattgtttttgtagagcgagggaggtttgggggtgtagaggttaagggtttttgtagagtttgttttaggttttttgagtttaagtttttttgtagttaacggaagattttttcgagagcgggtgttttttattttgtttgtttagtaggtgtttagtaatcgtttattggataaataatgaatttgtggatttaacgtgaagatgatttaaattagcgtttttttatagaatttttcgtaatgatgttaatgttttgtatttgtcgtagttaatatggtagttatatgtggtagtgaacgtttgtaatgtggaagggttattaaggtaaagagtttcgtatttatgttataatttaaatttaaatagttataaatgtttagcgtgtgtttcgttatatagattttttttgttattttttttttttttttagagatattgtattcgttattaattttttattcgggaggtaaacggagaaatgttattttttagttaacgtaaaagaaggttaatatttgtattttaagttagttttttgggtaatttttttaagtattttttattaaggttagtttagtaatattttttgattgtttgttacgtattaggaaagtatttcgtcgtggttttggttcgaggttatggaggatatagaaataattaaggttaagttgatagaaggggtgtgataagatggtttaaagttattgagttagttaggaggtttaggagtatggaagttttgttttttagaggataagtggtaatttatttagggggggttcgagtatttagagttaggagcgtagaagtagggggttttaggttggaaagcggtattagggttaggttgggcggtagtacgaatttattttcgaggttttgggggcggaaattaagggttttatgagtaagaagattcggtttaggtttaatggaaatgatcgggtggagggattttattattcggtttttagtatatagggagggaagtggtaatcgttttttaaatgttggtcgtggaggggaaggagttatagtagggtaggggtggggaggatggtatttgttggtttaaggagggatgatggaggtttaattaagatatgatcgtgatcggggtagtttgtttaagggttagtatgtagagggcgagttgatgagattttggtagtttgttgagatttgggggtgttggggaggtagaggttaaggttaattttgagattttttgtttgtaaatttgggtgggtggtaaggttgatattagagaaatagaggaagagtgggtagttatgggtgagagaggaagtaatgaattaggggtgtttgtaagagtttaggggtaaggttttcgggtagttaagatgttggtggttttttttacgattagttttttttacgtggtatatttttgtttgtatggttgggtatggggtatttgttcgttcgatatattttgagtagttattttgtgtattgaggtaacgtggtacggtgttttggggaaatagcgaggaggtattgtataggttttatttttttggtattttttgttttttggggatggtggtagttaaataagtgatagttaattgttaggagagtttggttttgatttattaggtggagttaggtatttttgtcggaagaggtatgggaattagtataggatgaagggaggtagcgagtattagtttaggttttgtttttatagggttttttttttatatttatttgtgtaggcgttttttgtgagggtagagatatttgtagtgtttgagggagattttttgcgggcggggtcgtttatttatagcggttaggtgggaggtgtattagtgttttgtggttgttataatggattatagttgtggggtttgaaaaaatggaagcgggtttttttttatgttggaggttagaggtttaaaattaaggtgttagtaaggttatattttttagggaggttttggggtggggtggggggggggtttttttttgtttttttttagacgttttttggtttggggttgcgttattttattatttgtttttgtttttacgtggtttttttcggtgtgtttgtggtttttttgttttttttaaggatattagttgttggatttagggtttattttaatttagaatgattttattttaagatttttaattatttatatttgtaaagattttatttttaatttttaggttatattttgaggtttttggtggatatgagtttgtgggggatacggtttaatttaggatagaagggatgatgggggtattggggaaaaggttatatattttagaggtattggaagatggaagagtaggatttagcgatacgggatgttaggtagaggagttggttttaaggattttagtcggggtttgagggttagagggagggaagtttaggtattattgagatgaaatgtttcgtgtatcgtgggaaatagggtaaaagttcgttggacgtttagttagagaggcggttgtttgaggtatagaaaatgagcgaatatgggagagtttattagaaggttattcgggagggcgtggtggtaatatttagaagggttgagaagcgtatttttatagtttagttaaatttatttggggaaatatacgttttcggtagtattagtaatagagaagattttcggcgatgttattagtgggttacgggacgggtaaattttgtttttttatatagaggaatattcgttagttgttaaaataagtgaattaaggtttcgtggatttatacggataagtttttacgtcgttacgttgtgggtataggtagggtagttattgattttagtgaggtattaaggatgtgatgttgatgacggtatttaagaggagatagatttaggttgtttagttatacgatgttgatgatcgtatgtaagaggagattaggtcggatgcggtggtttatatttataattttagtattttgggaggttaaggtaggtggattatttgaggttaggggtatgagattagtttgattaatatggtgaaattttgtgtttattaaaaatataaaaaaaattagttagatatggtggcgggtgtttgtaattttggttattgaggaggttgaggtagaagaatcgtttgaatttaggaggtagaggttgtagtgagtcgagatggtgttattgtattttagtttgggcgatagagcgagattttattttaaaaaaaaaaaaaaggagatttaggttttttagatatattattgtttagtatagatgtgtttgttcggggttagattttaatttagaggggcgggtatcgtagtaggagtggggttaggatggagaaggttatttagggttgcggttatatttgtaatgttttattttttaagcgggatggtgagtatataggtgttttattattttattttttatatttttgttttgtagttttaagaattttattttttttttaaaaggaaagaaagtgtgtgagttgattaaagcgttgattatggtgttatttaagtttttgttagaaatgttatttttggtttagttttaaatataatttcgagaagagttttcgtttttttggggagggtaagagttttagatataggagattggttagatgtggatttatagagaagttgggttgggaggatgggatggtagatagtcgtttggggagtgttaaatggggaggtcggagatgttggggcgtttaggaatgaatttttgtttggattagggttttagtaaaagggaggtagggagaaagaaagaagttaagaagatgaggaaagggtgtttcgggttagagtttatagaggtttatagagggaggatttcgtgtgttagtaggtagttttacgtaaatttagattattagtttgtagttttgggatttagtaaattatgttttaggtttttaagttgagttgtgatcgtggttgttaagtgttgatagtatagaattagttagtttgagtagagggaagtaatcgtcgggggaggttgtgtttatgtagtttagggtgttaggtttttaagatgtaatttttataagaattgggggattttttttatttattttattagaagttggttaatgagagggaaggagatggagaggtagattagatgcggagtcggagaaaagttttttagaaatatagtagcggttgggttgtttagtggttagtgtttaatatgattgcgatgggcggagttttttttaattatagcgttgaattatgtagttgtttaggggtttttagttagagtattatttttttttttttatatatagttttattttgtattgtaaggggttttatatgtatttaatgtggatacggtattttttttatttttattttttgtaaaaagttattttttttattgtttaggtttggtggtgtatagtttacgggtattgtatttatttttggaaggtagatttaggaggcgtttgtgttgtttttatagaagtaagtttaggattagaagtaggttttgggtttagaattttgaggttttaggtgttagtgtggtttggaattgtttagttttatagttattagttatacgtagatataagtggaaatttatttaaaataaataaataattttatgtaagtaaatgagtgaataaagtaaacgtaaatatttatattttgagtgtgtaatagatttaggcggttaagcggttattatataggatggcggagtgtagatgtatagaatagatttattattatagaaggttttattagacggagttggtttagagtatggaggtggcggttttagatgggtatatgtttttgttttcgtaggcgttttgttttggtaggacggttgttttattttgttttgaaggtagttttggtttataggcgttttatttgtgtggatttgatttcgggttcgtgttttttggtaattttgttttttttagaatggttaatttatgaaggtatagtttttgtttgtttgttattatgatggtagttaggggtttggtatttagttggtttttagtatatatgtataggtgattacgttatttttgttttttttagagtttttcgttttttaggggaggtaagtttatttattgttgtgatttattattttttttaaatagaaaagttattagatgggtatttgttttagtttggtcgttggaagtgatagttaagaataacgtaggtttttagaaatagaggtattagtatggttatattggggttaggtaggggagattagggatatttagtggggagaagatgacgcgtagatttagttttggggggtaagggttggaggtagagttttgatttttttgttttatttttttgtttaggttgtatttagtgttggtagagtttttttaagtttataagttgtaattcgtgttttggacggttagttttagagttttgatgggtgtatttgttttttttttttattggttagtgtggaaaatttttaaatatatggaaaaagtataaggagtagtatagtgattattgttagaggtttatttatttttttttagataatatcggacgtatttgttttattttggagtattttttattttgtaaggttgtagggagtttatagatattgaattaatatcgagaggtttacggttaaagttatttgtttatggtatatttgtttttttagtattttaaattaaattatttagttttatttattttttgtttttttttttgtttcgtatatacgggtttgttttttgagtttgggggtggttgtttttgtttttataaggattatttttagtagggtagcgtcgataggtttggaagttatttgagtttaaagtcgttaaagattgcgtttttttgggaaatgggtaagtggttttatttatttagggaagttaggtggggaggtaggttttagattagaatgaagggattttagtataaatatatttatgagttgggtggggttagagcggagcgagttatttatttgggttattggagttattaagttttcggagtcggttattggaggttcgcgtgttttttaaagatagagataaagggtaaaggttatataaggttattggcgtttttttttcgggtggatgattaatattaggaatgttttcgtttttgtttttgttgtgagttttagagttagaaacggggtttatttggggatagaggttttatttttttaggtaattttggacgttggagggatgatagttattgttgtttggttgttggaggggttttgggttaaatttttatatatatttttttttaagttttattatttttgttttgtagataaggaatttgagtttttatagagtgttatttttttgtggttatatagtgaatgagagttgtatataggtgagtttacgtttattagattttaagttgggttgtatttaagcgtgtttttgttggacggagtttttttttttttttatgtttattcgttttatgaattagggtttttttatattagggtttataatttacgggtagttttgatttagttttttttatttttagggttgggtgtagtcgggttggatttggggatggagtgggataggttatttttattttttgttttaggagggaataaaaatagaattttagattaatgtagtttttcgcggtatgcgttttttttgtttatatataggttttggtttggggttgtttgttggagaggtttatggtaggtaagttttaattcgaggagatttgttgaggtgttaagttaagtaaattcgaaaggttgttaggaggagcggttttgggagtataggcggttattttattgttgtagagtacggtattttggggatgttttttgggtaatgttatatagttattttttagagagttttagggatatataattagtttagttttattaatagtgagataagggattaggtagatttagatatttttttgtatttgattattatgttggttgttggttaaagatgttagtttttttttggaattttttagaaaggtttttgtagtatttatttatttatttatttatttatttattttatttatttatttatttatttatttatttatggattttatttattttattatttttttatatatttatttatttatttatttaatttatttatttagttttttatttatttatttatttattaatttatttatttgtttatttaatttatttatttattaatttatttatttattatttatttatttatttatttatttatttatttttttatttatttatttatttttttttttatttattttataattttatttttaaattgtgattagatggaaatgggtgtagttagtttgtttttaaaggtttagagcggaggtagagtgaattgtttatttggttttcgtgtttagtagtttaggtttgtatatatgttttataattataggatattagatttagtaattggtagtagaatgagtatagtgtatttttcgcggaattagtattgatagggtatttatttttattaagtttgagtttttttggtgttggagggaatttttagatgggttttaattttagttgaatttattttttagggaaagtaatatcgtgagaaatgcgtgtgatataaggttttaaagagggtgtgggtcgtgatttttggagtaattagggaggttttatggaggagatgaggataaagttgagttttgaaggagggatcggaggacgttgagtagggatatttatttttgtttgcgagggtttgacggtaggttgtgagttgtattttagtttcgatttatttaatttataattttagtaggtaggtgttttcgttttattttatagaggaggaagcgaggtttagggttgggtaaattgtttaaggtcgtatagttgcggaatttatttttagtatttttagtttgttttagttatgttcgtgattttatttagtattttttttttggtgtttatttattttgtttattgttaagtaataaaaattttattaggaaaatttaggggtttttggttagtttttttagatagaaaggtagatttcggcgtagatttttaggaagtaaggatggaagggttagtatttgttttttagaaatgatagtttttttaagattaggagagatggtttagagtgtagtttcggtgggttgtttaggattaggaggggagaggagcggggaggaggatgaattttatttttaaggttgttgagtggtatatagtgagtttggattttttagttttagttgagtttatttttacgatggttatgagtattttttttatatattcgattggaagtcgtattgtatataacgtatacggggttattattttttgttttatatatttttacgtatatattattagtgtattattgggatattttgttgttcggggttgagagtgaattagaattttgtttataaatttagtatattttattgtggaaataatggggggtaaggaggggtcgtttagtaaagaataggatatacgtttttgaggatggagttatttttggttgagatatttttgtaggggatgtcggcgataaaggttgttttatttttttttttgggttagatggatattatttttgttttttgttttttagtattaggtaaaaggaaaatagaagaggttttatttaggttaaatattttagggttttttattcgtaggaaatatgttggtttattttttttaaatttagtatgggggtggagaaacggtggggaaaatagtatttgttttagattttttgggtggagtttttgttttatttatattgtttatttttttgattttttaaaatgggtatttggtgtttggtagtttttggtatagagaagacgtaaagtaaatcgtttataagaagggggcgagcgtagtttgagtattttttgtttttgaataaattgttaggtttagcgtagtcgttgtcgttattgttgtttttaggaagggatttttggttacgagcggttttagtttagttttttggatttaattatttaggtttgtgtttgagtttagtaaagaggtagttagaaaagtttttaagatatttaacgatttcgtggttttagttgagaagtgagttatttttatgtgattttaaaataaaatatatttagaaggagagaagataattgaaatttagttgtttggagttattttagatgaaagtatttgagtttttgggaggtaaaggaggtaggaaagtttggagttagatgattagaatttgaacgtagatttcgttaggtttttgttgtgggttttgggagatgatttttattttttgagttttagtttttttggggatagagatggtgtttatttataggttgtttcgagttaatgaggttatatggcgtaagtattagtatagtgtttggtataaaattaaaatttaataagtgatattattattattattattattattattatttttgagatggagttttgttttgttatttaggttggattgtagtggtacgattttagtttatcgtaattttcgttttttaagtagttgagattataggtatttgttattacgtttcggttaatttttgtatattcggtagagatagggttttattacgttggttaggttggtttcgaattgattttaggtgatttgtttgttttagttttttaaagtgttcggattataggcgttagttatcgttatttggttgtgatattattataatattaatattataatagttggttaggtatggtgatttacgtttgtaattttagtaatttgggaggttgacgtgggttagttattcgaggttagttcgagattagtttgattaatatagggaaattttatttttattaaaaatataaaaattagtcgggcgtggtggtattcgtttgtaattttagttattcgggaggttaaggtaggagaatcgtttgaatttaggagacggaggttgtagtgagtcgagattatattattgtattttagtttgggcgatagagtaagattttgttttaaaaaataataataataaataaataaaatatattttgacgagatatggtaaaagatagtagaaggtaggagttcggggatttattatgggtcggcgttttaagtagaaagaaatgtagtgtttataagttagagagtagatgtcgaagataggagacgagcggggttttttggttttggagaggaaagggtgagtttaggtagaaagagtaaatttagggcgttttgtgtagtgttttttttgtggaattagtttagggtattagtagtatagtttttttttagtagtggagattaggttaattgtttagtgttttttttgtttttttgttttaattttattaagtatagtttttttttgggtatagtagttttgtaggggtggatattgatttatgtatttaggagtttagaggtttttttttttttatttatttatttagagatggagtttttttttgtcgtttaggttggagtgtagtggtattaatttggtttattgtaatttttattttttaggtttaagtgatttttttgttttaattttttgcgtagttgggattataagtatgtattattacgttcggttaatttttgtatttttagtagagatggggttttattatgttggttaggttggtttcgaatttttgattttgtgatttttttattttggttttttaaagtgttgggattatagacgtgagttattacgttcggttaggggttttttttaatggattttttttaatgtatataatttggggaatttagatataagaaagatatagagtatgaaggttttttattggtttgtttatttttagaggtggggttttaggtggtttaggttggttttaaatttttggttttaagtaatttttttgttttggttttacgttgggattataggtataagttattacgtttagttatttttttttttatttgggttgttatgttagaatttggtaagttataagatggaaatgtttaaataggtatttagaatttgagtagatattatttgatgtattattgttgttattttaatgattgaaatgtatttattatattcgtttttttaaaggttattttagatttttatagattttatttgtgatgtaagatagttattttaaatttttttgtgggttcgaatagattagatttttgaatttttgggtagagtagggatggggttgttttagaggagggtgatatcgttatatttttgttttgtttttgtgttgataatgaatgaggtttggatagttttttttttattaaaagttatatttttttaaaaaggagttttttaggatgaggcgttatgataatttaattgtgtataaatatttatttttaataatgatagaagttatttatagaaaagaatttatttttggtcgggtacggtggtttaggtttgtaattttagtattttgagaggttaaggtaggtaaattatttgaggttcggagttcgagattagtttgattaatatggtgaaatttcgtttttaatgaaaatataaaattagtttgtatgtttgtaattttagttatttaggaagttgaggtagaagaagtatttgagttcgagaggcggaggttgtagtgagtcgagatcgtgttattgtattttagtttgggtgatagagcgaaatttttttttaaaatatatatatatatatatatatatatatatatatatatatatataaatttatttttatttttttttttgaaatttttgagagaggttaggtgtagtggtttatatttgtaattttagtagtttgggaggttgaggtgggaggatggtttgaggttaggagttggagattagtttgggtaatatagtaagattttatttttattaaaaaataataaaagtttaaaaagtttttgagatagtttttggggaaaggtgggttatggagatttttattttggttattcgtgtttttttcgtttgtttttttgtggtttttttttattttgagtttggggtgggggcggtttgagtttaggatgggggtggtttgagtttggggtgggagcggtttgagtttgggatagggcggtttgagttggggtgggggcgttttaagtttgggttgcgggtattttgagtttggggtggggatgttttgagtttggggtgggggtgttttgagtttgggttgagggtggtttgagtttgtgttgggggtggtttgagttgggatgggggcggtttgagttgggatgggggcggtttgagtttggggtgggggcgttttgagtttgggatgggggtattttgagtttgggatgggggcgttttgagttgggatgggggcgttttgagtttgggatgggggcggtttgagttgggatgggggcggtttgagtttggggtgggggcggtttgagtttggggtgggggcgtttaggatgtataggttttattttttttttttgaggtttagtttgtttataggagttgtgaagggttggattaaagttaaaggtttaaattttagatttatttttagatttagtggataattaaaatatttaagtttatttttaaaggaagttgagataaggagataatggttattttttttttttttttttttttgtttttggtttttgttatttggagttgtgttttgaagaggtatattgggtattaggtttttttggttttgtttttattttttgtttagatatagaataatttttttttatttttaaggttgatacgtggggttgtggattaaagttaatttatttatttatgaggggagtaatttttttgttttaggaatttgtttttataggagaataaatattgtagaaggtattgtttttagtggtggtgtacgtttgtaattttagttatttaggaggttgaggtagaagaattgttagaatttaggaggtggaggttgtagtgagttaatattatgttattgtattttaatttgggtgaaaagattaagattttgttttaaaataaaaaaagaatagtattttgtgttaaggttaggggttttagttattttttttgtgaagcggaaggggtattattagtttttgtgagaaggaaatagtttatttaattataaaatgttaattaaaggaggtagtatattggttttggtgcggtgtcgttggtttttgtttggggtaggaggagggttgggggagagttaaaagttaaagaaggtttatggaggtcgttttttttttggtgattagttttttttttgacggtaagttgttaatagtatttggtttttaggttggggaaggtgagattagtttatatttgtttagggttttgttttgtttgtatgggtagtaggcgtttattttgttagatggttttgtttattatagggtattagtgttagttaaggatttatagagtttttttgtaaaggtttattagtgggtattgggattttgggttttatttatatagggtttttatataaaatataggatgtttagttaaatttggattttagataaataattaataattttttgaagagataaggattttgttgttttatttaagttggagtttagtggtatgattatggtttattgtaattttgaatttttggatttaagtaattttttaattgtagttttttaaagtattgggattgtaggtatgagttattaaggttagtaaataatgaattatttttaggtataagtatattttaagtttgttgtgggatatgtttatattaaaaattaatttttgtttatttgaaatttaaattgaatttattgtcgggggagataatggagtgatggattgatagaggagtatagagatagtttttttaaatttttagttgattaaagtttggtttttagtttttttgggtttttagagatgtattaagggtggaagcgattaggagggagataaaaatattgaagtttgagtgttagtattgagtcgtgtggttttggataggattgttttttttttgagttttagttttatatgttataattggttaataatagttataaagtattcgaagttaatggttgggagtttgttttaggaggtaggtattattaggatgtagagagagtgaggagtttttaaagttagtttaggttaggtatagtagtttatgtttgtaattttagtattttgagaggttgaggcgagagaattatttgagtttagaagtttaaggttgtagtgagttgtaattgtatcgttgtattttaggttgaatgatagagtttttgtttttaaaataaaataaaataaaataaaataaaataataaagttagtttgtgtattggattgtatgttgttttaaagtatttaaagtgagagaggttaggaagtaatgagatgtagaaaggtagggggaggaggtttagaggtattagagaagatagttgatttttatttttatatatttttggggtattttgagttttatttatatatttaggtgagaatttttgtatttgtgaaagtaatttgaggtcgagagaattaataggaaatcgttttattttttatgtagggtttttttataaataaggttgagtcgtagtttattattgtagttgagttttttgtagtagttgcggtggggaaggttttttaggaggtttgagtaatttagaaatatttatagtatattttttagtttttttagaggtttttgttgagatgaaagtgttttggttcgtggttaaagagtttagtatattgggtagttatagtttttattatattgatttggttattaggtttttatgaatttagtgaggggagatgggttttttagggaagtttgttgatttttttatattgttgtaaatgtaaagtttggtgattttattatttttagtaattgtgatgtagtaataataagaatagttatgtttatcgtttattgaaggtatatgatgagttagatattgtgttggtatatgtgatttttggaggtaatatatttttttttaaggaggaaatgattgagttttggagggagggttttttatttggttttaggtttttttttgatttgcgttttttttttttttttcgtttgttttattgtagtttttttggtttttttgttgtttttggaatgtattaagtttgtttttagtttagtttttgtattgttggtttttttttgtttttttaattttaatttagttgttattatttttgtgattttttattatttattttaaagtagttattagttattttttatgtaattattttattttaatttttattatagtttttagttttattttgatagtttttagaattgatgaatttattgattttgtttttttttattgtatgtaaattttaagaaataagagtttttgtttgtttattgttgtgttttagtgtttgttatagtatttggtatgtagtaggtgtttaatgaatatatttttaaaagaatgaacgattggaaggagtttgaaagaacgatggtttgtgttaatagtttatttttaatttttttagacgggatggagattattattatgtaattacgatttttttgagtttgtgtggtggttgacggtaggtgttagtttggttggattaagggatggttggtaacgtatcgtttttgggtgtgtttgtgagggtgtttttggaggagatgggtatgtgagttggtgggttgagtggtaaagatttttttttaatatggatgatattattttattgttagataataaaaaggtagagaaaaggtgaatttttttttttttttggaggtgggatgttttttttttttgtttttggatttagaatttttagttttttagtagttttttaggtttttaaatttttggttttaaattaagagttatattaatagttttttagttttgaggtttgtagatttggattgagttacgatattggtttttttgggtttttagtttgcggacggttttttgtggtatattttggtttttataatggtatgagttaatttttttaataaatttttttttatttatttattatttatttttttaattgtttatttgtttatttatttatttatttattatttattttttatttatttatttattatttatttaattaatgtatttatgtttgtttgtttatcggttatttatatttatttattaattatttatttatttattatttatttgttatttatttagttatttatttatttatttatttattttttttttttttttgagatggagttttattttgtcgtttaggttggagtgtagtggcgtgattttagtttattgtaatttttattttttaggtttaagtgattttcgtgttttagtttttcgagtggttgggattatagatatgtattattacgtttagttaatttttttatttttagtagagatggggttttattttgttagttaggttggttttaaatttttggttttaagtgatttatcggttttagtttattaatgtgttggttattataggtaagagttattgaatttaatttattatttgtttgtttgtttgtttgtttgtttgtgtttatttgtttgtttggttatttattatttatttatttatttgtttgtttgtttgtttgtttgtttgtgtttgtttgtttttatttttttgtttgtttgtttatttagttatttgtttgtttgtttgtttgtgtttgtttgtttttttttttttttgttcgtttgtttgtttatttagttatttatttatttatttattttttattggttgtttttttggagagttttggttgatgtagacggtgttttggtaagtttaggttgttatttagattattgtggagggagtgatttaaataatagatatgtattttttagtttgagaggtttaaagtttcggattaaggtgtcgttagggttagttttcggcgaggtttttttttttggtttgtatttatttttttgttgtgtttttcgttattttttttttgtttataagtgaggggggaggagagatttttggtgtttttttttttttttataaggatattaattttattagattagggttttgttttatgattttatttaattttaattatttttttaaaagttttatttttaattatagttgtattgggagttagggttttaacgtaggaatttaaggggaagggtatagtttggtttataataaatgggaaattatgtttatgattaaattttttagaagatatggtttattagcgtcgttaatgattgtaagtaaaggttagagaggaaaggggttttcgtggggtggggggcggtgggggtagttggtgtcgggaataaggtttttttttttgtttaatagtagggaagtgaggtcggttgtagatgttatttggggtgggaagagaggggagtttttgtttgtatattttgtgtgggttttggtttgattttttttcgtgttttttattttttgtgtttttttttgtgtgggagaaacgtcgatttttgttggtttaggtgtttaggtttttaggtttgttggttttgggttgggtttaattaacgagaggtttgggaggaatttgggaggtggaagtaagggagggcgcgggagttttttattttttttgttttagatagtttttttagtaggagaggtggttttttgtgtagttttagtttttgttagagttttatttttgtttgggtttttagtaggtgattttggtttttggattttggttataggatttttttttttttatttttatttaggggtggtggtggtattttgttgttaatttttaggttatttttataatgttaagaattttttttttatttgtatggtttttttttaaggtattgagaagggttttaattatatgtttatagggttaaatattttttgtaaaatttataaaatggaaaatattttttttataattaattaacgttttcgtttatttttagttttgagtttttgttcgttatatttttttttgtgtgaggtggaaacggaggtttgttgttacgtgggggtttttgttaaggagaagttgaattggaaagatatttagtttggttttggtcgggttatatttatgtagtttttatttatttttatgtatagtttagttattgttcgttatttcggtgtggaaacggattttagtaatattcgttttatttatcgttttaattttatttatcgcgtagaattaaaaattataagatacgaatatattttgcggtgtttggcgtcggaaaaacgtgcgtagtggagagaagtaagatttgaaatgtacgggtttagaagtaaatttgtggaaaattatttttattattagaggtgaagttgtaagtaaaggatttagtttttttaatgtggagttaaaatagaaaagtttttttggttagaaatatatgtataaatgttttatatgtagttagaaattttttttatttttttattttttttttgatgggaattatatttaaaaaaaaagaaaaaaataggatttattagaatttttgtgtattttgaataaaataattgtagtagtattattaattttatgttgatcgttatttttgtatatattttaattattaaaaataaaaataaaatttgattaattaaggagatttattcgttttatttatttatttatttttgagatggagttttattttgttgtttaggttggagtgtaatggtacgattttggtttattgtaatttttgttttttgggtttaagttatttttttgttttagttttttaagtagttgggattataggcgtgcgttattatatttggttaattttttatgtttttggtagagatggggttttattatgttgattaggttggttttaaatttttgattttaagtgattcgtttattttaattttttatagtgttggaattataggcgtgagttattacgtttagtttatgtttttttttgttgttttttttttttttttgagatatggttttatttttttatttaggttggagtgtagtggtatgattacggtttattgtagtttcgattttttgggtttaagtaatttttttattttagttttttaagtaattgggattataggtgtatgttattatgttttgttagtttttgtatttttagtagagacggggtttcgttacgttgttcggatcggttttgaatttttggttttaagtgatttatttgttttggttttttaaagtgttgggattataggtacgagttattgtgtttagtttgattagttttttgttttcgaaatagaaaacgatattataaagttattatattgaagaagtaatgttaaaaatgtgggagaaatagaattttggagatatgattgatagttgattggtatttttttgtatgtagtgatgtttgtgatatttaatagttgtttataatttataatttgttgttatttatttttttattttaaatgaattattgtatttatatttttagagggttgtataagtttatattattttgattttttgttgattgtttttttgttttttgtttggtttttattttttttattatttgtgtaattagtttttcgtttttaagtttttttgttttaaatgtttaagtggattaggtattgtggttttcgtttgtaattttagtattttgggaggtttaggtaggaggattatataaatttaggagtataagattaatttgggtaatatagtaagattttgtttttatatatatataaaaaatataaaaattagtaaggcgtgatggtatatgtttgtagttttagtattttgggaggttgaggtaggaggattgtttgaggttgggagtttaggattagtttgggtaataaagtaagattttgtttttataaaaataaaagaaaaaattaggtaggtatatagtgtgtatttatagttcgagttatttgggaggttgagaagggaggatcgtttgagtttaggagtttaaggttgttatgagttgtgattatattattgtattttagtttgcgtgatagagtgagattttgttttgggaaaaataaataaataaataaataaataaataaataaataaatgtttaagcggtttttattttttggttagattttattatatattttatgaataaatcgtatgtatgagaaaggtgagtagatgaatagggtagggttagggggttaaggggaagattatagattacgtggagcgagattagtggttaaaaattgttaattatagttaggtttggtggtttatgaaggtaattttaacggtcgggtttggtggtttatgttcgtaattttagtattttgggaggtcgacgcgagtttattatttgaggttaagagttcgagattagttcggttaatgtagggaaatttcgtttttattaaaaatattaaaattggttaggtatggtggcgggcgtttgtagttttagttatttgggaggttgaagtaggagaattggttgaattcgggaggcggaggttgtagtgagttgggattttattattgtattttagtttgggcgatagagcgagattttattttaaaaaatttaaaaaaaaaaaaataaaaaattgtagattttaataaggaagagttataggacgatattttaggatgcgggaaaaggttacgttagttttggattttttttgattaatgggtattttagttattaaaggggtagatgcgttttatttaatttttatttagttattagagtataatatagggatgtgttatagatagagatggagattaataggtagaggggtgatggggaggaagattgaggtaagaggaataaaacggggattgtagagggtaggtggtaggagtttgagggttttagaagaaattgttgtataagtaatgagttagtagggtgagtgacggttaggagaggtggtttaagaaaataaagagatattttcgggggtatagatgcgttttgaggggtcgaggaagagatggggaaggggtggttttgtggattttcggtatgattgtcgtggtgaaaaggaattaaagatttcgataaggggatgattttttaaataaggaagttttgggttttcgtagggggattagtagattgagggtaaacggtattttgtttattaaagttttaataaaatgttaaggtaagaatatttgtttggttttgggggtaattttagaaatattagaaaagggatttattatgcgtaatttttttttaattatttggagaaatgtatggttatttaagatagagaaaggtagttaaagtaagtggaggttaggtatagtgatttacgtttgtatttttagcgttttgggaggttgaggtaggaggatcgtttgaggttggaaatttagtattagtttaggtaataataaaataagattttgtcgttataaaaataaaaataaaaattttttgagacggagttttattttttttgtttaggttggagtgtcgtggtacgattttagtttattgtaattttcgttttttagatttaagtaatttttttgttttagttttttgagtagttgggattataggtatgtgttattatgtttagttaattttgtagttttagtagagatagggtttttttatgttggttaggttggtttcgaattttcgatttttttggttttttaaagtgttaggattataggtatgagttatcgcgttcggttgttataaaaattttttaaaaattagttaggtatgttaggcgcggtggtttttatttgtaattttagtattttgggaggttaaggtaggtggattacgaggttaggagtttgagattagtttgattaatatggtgaaatttcgtttttattaaaaatataaaaattagttaggtgtggcggtatatgtttgtaatcgtagttatttaggaggttgaggtaggagaattgttttaatttaggagtcgggggttgtagtgagtcgagattgtattacggtattttagtttgggtaatagagtaagattttgttttaaaaaaaaaaaaaaaaaaaaaattagttaggtatgtagcgtatatttgtagttttagttatttaggaggttgagaagggaggattaattgaaattgggaggtcgagattgggaggttatgattacgttattgtattttaatttgggtaatatagtaagattttgtttaataataataataataaataatgtaagtgggtataagaatttatttatttatttatttatttatttatttatgagatagggttttattttgtcgtttaggttggagtgtattggcgtaatttcggtttattgtaagtttcgtttttcgggtttatgttatttttttgttttagtttttcgagtagttgggattataggcgttcgttattgtatttagttaattttttgtatttttagtagagacggggttttattatggtttcgattttttgattttgtgatttgttcgtttcggttttttaaagtgttgggattataggtgtgagttatcgttttcggttttaagaatttattttattttagtattttggaggttgaggcgagtggattacgaggttagaagattgagattattttggttaatatggtgaaatttcgtttttattaaaaaaatataaaaaattagtcgggcgtgggggcgggtgtttgtagttttagttatgcgggatgttgaggtaggagaatggtgtgaattcgggaggcggagtttgtagtgagcggagatcgcgttattgtattttagtttgggtaatagagcgagattttattttaaaaaaaaaaaaaaaagaatttattttaagatagtaagttttagggttgaagttagtttttatttagttttaggtttaaagttataagtatggttattgtaatatttttatttaggatattattttttaggggtttagatttatattattaaggaggagcgtttatattagtagttggggagagggtggttttttataagatgtaatgtttattttgaagagttattatagtgataattatgaaatttatgtttgagatttaattttaagtgaaaagaatagaatttaatatttattttatggggagtataaaattttgaaaatatacgttttttataattaaattaaattttatgttatgtttttgaggagataagtattgaatggaatatagaagaaatgttatagttaatgattgttgaagttttttttttaattttttgtttatgttgtttggtaataagtaatatagaaaattgataataaaaagtaaaagagaaagaaaagatatagtgtatagtttagattgttttttttaaaaaattaaataataataataaaaagtataggtcgggtgcggtggtttacgtttgtaattttagtattttgggaggttaaggcgggcggattatttgaggtcgggagttcgagattagtttgattaatatggggatatttcgtttgtattaaaaatataaaattagtcgggtatggtgacgtaggtttgtaattttagttatttgggaggttgaggtaagagaatcgtttgaattcgggaggtggaggttgtagtgagttgagatcgcgtttttgtattttagtttgggtaataagagcgaaattttattttaaaaaaaaaaaaaaaaaagtataaatgtaagttgggcgcggtagtttatgtttgtaattttagtattttgggaggtcggggtaggtggattatttgaggttaggagtttgaaattaattcggttaatatggcgaaattttatttttattaaaaatataaaaattagttaggtatggtggcgcgtgtttgtaattttagttatttaggaggttgaggtaggagaattgtttgaatttaggaggtagaggttgtagtgagttaagattgagttattatattttagtttgggtgatagagtgagatttcgttttaaaaattaaattaaattaaattaaataaaataaaaaaaagaagcggtataatataaagtttcggtagttaaagcgttaatttttagttattaggaaggttttgttatttaatgatttatcgttttagttaaggttagttatattttgggtttttgatgttggaggtaatatgatgttaatattggcgagaaatttattattttttttttttcgtttttcggtgtcggtttttgtgtgtatttgtagtttttttattatcggtgtttttatggtgtttacgttatcggtttattttttagtaataattcgatagttcgatatttttgtagattttgtggttatagagttaaagttttttgttattagtgggttttgtagataattttttaaatttttttgggttgagttagttaagtttttaataagttggaagatgataggggttggatgtaatttatttttaattggtttgggttatatggatattattttttttttgggatttgatttgggatggaaataggagttatagtttatgggaaggttgtgaaaggaagtttcggttttagggtgcggattaggttgatttgcggaataaggttttaggggcggtttattcgtttgttttgtttagttttttttggtaattatatttattcggggtttattttaaatttggtaggtaatgttgttgtttttattttagtcgttgttttaatacgtttcgtttggttaggataggtgtttaggtatggtatttagggatattttcggttttcggggtttaatttttggtttttaggtgtagcgttgggaaaagtagagggtttcggttatggcgtaggtttcgttataggttatttaagtagtttgggaggagtcggaaagagagtaatgtatttatttggatagagattgaagttatatttttattgagaaaagatgatatttttgtttggattttttttttgaaattttaggtcggggtggggtaggagttagcgagagagtttagcgttttaaaggggattttttggtttttcgtgttttttaatttagtatttttggggatttatatatttagggtagagtggttatttagggttttttttatttagatataaaggttattgaaggtttcgggttaatatcgttttgaggatgattagcgatttgagtttttgttagagatagtaggtagtttgggtttaagggtcgtttagtgatttgaagttgggattattttatattttttgcgttatttttgttttttgttttggaggtttttaggttgttaatagttatgttttggagaattaggttagattaggttgggaataaagtttagttgttatagagttgtcgagaggttattggtaagtagtgtttaggagtcgttttttttttgttagtaatagtttaatgtttttttttataggggttgtaaatgggtttatgtttagggtggggttagggagataaagtagagagaaattgggttgggagtagagagtgttatgttttattttggagatttaaggttaggttattttgtagagttggtgtttagagtttttagcgtataggagaggaggtaaatagaatttgatatttagtagcgttcggtagacgtttttggaatgaatgattaaatttatatggagagttgaaatgggttaggaattttagggagacgggtagtttatagtttagtagggtcgttttagtagagtaggttaatgttaggttttttggtaaatttttcggggtttaggtataattgttatattaggaaaggggtaggggtgattagtttatcggttacgggggtattttattgtttttatagaagttcggtatttataggtttgggtgatatacgatttttatgtttggtattacgatggttgtttattaagtttttttatttattaggattgattttttttggttagcgattttagattattatgatttggtagttgtcgttaggtttgtttggttaaggattttttcggagattgagttattttatatagtaaagtgagttatggggttatagcgttgtgtgttgtgtataagtttcgagggttttatttagggattggtatttattgatttttataaatttttggtaatcgtttagagttgggatgtttttaaggtaatagttttaataaatagaggcgtaggaatttagcgcgttatttttcgttttattttaaaggtttatatttttaggggtttggagtttttttttggagttttttttattttaaagttagttggatttgtttaggaattgttattattattttttggtcgggtttgtattgatgtgtattgaattttttttattaggtttattttaggtaaattttagagtttacgtaatattgtttgtggataaatattggggcggaaataggggttatttttaggttttagttatatggggttgttagggttgtttgggatggtaggagagtgttagaggagggtagtttaaggattaggtagggggtgggaagtgtttttttttatgggtttttaagtgagatgttttttgtaaatatttatttgggatttttaagtagagggttggtttttatgttatttggatttggattttagattattgtttttaagtggtaattttgggtttttttgtatttgttttggtttgagttggttatatttgtggggggtggttttaggaagaaggtggattgtcgtaaacgtaatgtttcgttgttaggtgtattgttttcggttattagaatttttttgggtaggtcggggagatttgacgggtaagtgtttgcggtttggcgtgagcgggtagggtaggtggtttttgtttgggtatgtttttttatttttgtaatagattagggagagggttggttttaggatttaggtttagttagttgttttataattgaggggtttcggcggaggatataagttagatagagttatagattaatcgtacgaggtggttttttttttttagtttaggttttttgaatgcgttagagtagataagtttggacgtgaggaggtaagaggtagcgagaataggcgcggagacggggttgggggagaagaggaagaaattttgtgtttgtgttttttttacgttcgtttgttatcgggttagttgattggggaagtgttttttgagggtgtaattttttgtttttttcgtaagttagttttcggggcgttgggtgagggtgtagttttgtttattacggcgagttagtatattgaattacggtagaagttgttttttgtgtgggtgtagtttttttttttgtttaggatttagaagttacgatagtatagagttttttaatcgtggttggtgtttttttaggaattttttgaaagttatagagaaattttagagtggttgggtacggtggtttatgtttgtgattttagtattttgggaggttgaggcgggtggattatttgaggttcggagttcgagattagtttggttagtatggtaaaattttatttttattaaaaaatataaaaattagttgggtacggtggtatatgtttgtaattttagttatttaggaggttgaggtatgagaattgtttgaatttgggaggtagaggttgtagtgaatcgagatcgtgttattgtattttagtttgggtaatagagtaagattttattttaaaaaaataaaaaataaaaaaagaatttttagagtaatttttaggtgttagtaggggtgtgacgtaattttagtttcgtttttgtggtttatcggtttcgggtaagtttttttgtcgttgttatttatagagagtttttaggggagtttgggaatgacggtaagttttatgtgatttagtatgtaaagggagttttaaaatttagaatttagagagttagggcgggtatagtgtagttggttttagtgttgaggggttgggggagagattttgtattatgttttgattatagtaagggaagattatggaggtttttggaacgttttagtaatggcgtaattttagttttttttatttttttgttaatgataattatgattatgatagtagttaataggttatagagtaggtattttttagtttttttaaatatgaattcgtttaatttttataataatatagtattgttttatttaataaatgaggtaggttgggcgtggtggtttatgtttgtaattatagtattttgggaggttaaggtaggtagattacgaggttaggagttcgagattagtttgattaatatggtgaaattttatttttagtaaaaatataaaaattagttgggcgtagtggtacgtttttataattttagttatttaggaggttgaggtaggagaattatttgaatttgggaggcggaggttgtagtaagttgagattatgttattgtattttagtttgggagatagagtgagatttcgttttaaaaataaataaataaataaaattaaaaaatattatatatataaaaaaataaatgaggtaaatgagatgtatgaggtgagaattttgtgttatagggagaggcgtagtttggtgagatttaattttaaggggttggcggttttgagtttttaagtgtaattattggattatattgtttgtagattattattatttttattttattggaaggtcgggtgaggtaatcgggaaagtttggagtagtagtggagttgttagagagaatttgtttttagtgtttttttggattttgtagttgttttgtgtgggtttttgttgtttttcgtattggaaaagatttttttatagatggggttttatgacgttatttaggttggagtgtcgtgtttatttttaggcgttgttatagggttgtagttttgaatttttggttttaagcgatttttttgttttagttttttgagtagttttttgggtttaagcgattttcgtgttttagttttttgagtagttttttgggtttaagcgattttcgtgttttagttttttgagtagttgggattttaagcgtatttggttaagtttttttttattttttattatttaagatttttttttttttaaggtttagtttaattttatttttatttaaaattttcggggtatttttgtagtatttggaggttgaattgtttaggagggaagggtgttaatgagttggtgtttcgtttttattttgattttcggtgagaatgtaagttttttgtaggtaaggattatattttattattatttttgtatttatttagatttggttatgtgtgtttagtatataaagtgttttcgatgattgtttatagatttacggtatttgagattgttttaatatatttttttaaaattttttttttttttagaggtttacgaatgtttaaattaggtttatcgggaataatattatggttatttcgtttattttgaagtttatatataggtttggaagtaataatttcgtatagtttagatgaaaaaataaagatttttttgttgtttttggattgttagagttttgggggatttttaatattttttgttgttttttttaattttatggtgtcgatggtttgttggggggttagtttgatttttgcgagtgttcgtattcggaaaagggttggtgttaagatagttttaggatatttagaatgagggtaagaggttatttttattattagttttttttagttttattttatataattgtaatatagtgatttagtatattttgggttattgttaagtagggagtaaattagaaatggtttgagttttttttttttttatttttagaggggtttgtttttttaggtaaatataaggaggtatcgaggttgttgtataagagttggtttttgtttattttataaattttatttttatttattgtaaaaggttttgtttttttttttaaaaaaaaaaaaaaaaaagaaatttagtgaggggtggggtaggtgtgtgtggaggagaggagaaaaggataagtgatggtttttttattttttagtaagtcgtaggtgtagagattttaagtttgttttagggttttttcggtatttgtgtaggagggttttcgtagaaaaaatttaggatttacgatttgggaggatttcggttatttttattgtttggatttattagtgggaggtaaagtgtaagaaattaagggtaaagggttttttttgggcgggttagagattttttggaaagggttatgtatcgcgcgatttttataataattttaagtatttggagtatgttggggaggaagtttcggtgttaaaattaagtatgtgttatttggaagttcgttttcgtttattagtatattaatttatttacgtttttgatagagttgtgtttcgggtgcgtagagggttattttgttcgtaataatcgggtgaaagttgaaattttaagttattgatttagaagggtattttcggggaagttttgagtaattttttttgagataaggtattttattatttattttggtttttaaatatggaaagttagaggaaatcgataatggtttaaaggtagggggatggtttcgatgatttttttatttttaattaaggtttatgattttgtttttttattaataaaaattaatttatggatttttggtaggtatttttttatttgaatgaattaaaggagggatattaaataaacggtttttagatttagaagaggagacgttatttataatttgaggattgaggaggataaaggattttgtttgtttggattttttggagaaaattataaaggaaaaaaaaaaggaaggaaaagataaataatgaagatttggattttttttaatttgtttttgtggtttcggtgtgtttatttgtgaaatggaattttagagtgttagagcgggagttttttatgaaatgaaagtttttgaatcggtttatggtgaggtttaagttaggtttttttcgtttatttaaggcgggttttgttagggtggagtgaggatgttagtcgcgggcggcgttttgagcgtaaaacgtgaattcgagtcgttaagtttgggcgttgttggacggttttatttggaggtcgtttcgtgttttattaagtagaggagaaatcgaagagaattcgaagaaaggatgttgcggtttggattattagttttagaggttgaatttaaggatatttttttatttagtttcgattttatttatttatatagacgtatagggatttaaagtattcggtcgatttggaaagttagcgatttttgcgagggtgtaaggggcgaggaagagggagcgttttttagggtagttttttcgatattcgagtaagggttggagatagcgtaggggacggtcggtttaggtcgaaagcggttcgatagcggttttgttttgggaggaattcgatttgtagtgtgttcgtcgcggggattcgtttagtttcgggggcgtttcgttattttcggtcgtaggtatttaggtgagtagcgttggtttcgggatatcgatttttttttatttcgggcgcgaagtttatttgagtaagatttttttatggtgttttcgtggtcgtcgtttttaggaaagtgtggcggcgaggtagcggggcgcgcgtttttagggcgttaattttgggtcggtagtaggaaggcgggaagagggggcggttcgtcgtttggagtgtatcgatcgggtttcgtttcggtttcgttttcgtttcgttttttttcggagatgcgtatagaatttcggtttagtcggttgtggtttcgtttttgattcgtttttttttcgtttcgtgaacgtgcgcgtcgagttttattttcgtttatttttgcgttgcgttgtatttggcggagcggggttggcgggcgtcgggtttgggagggggcgttttcgcgcggtagcgtagattagattagattaggttaggtcgggggtgggggtcgtttgcgtggttcgtcgcgttcgtagttttgtatttttagtttttcgcgttggcgttaatggttggtttcgggagtcgtcgtattttttagtttcgagttcgggcggggcgggttcggttaggtggaagcgggcggaggtgcgggcgtttcgggcggtttcgtcgggcgaggcggcggcgtcgggtatcgcggcggcgtcgggtatagtcgggggtcggagtcggggtgtcggtttagtgggtcggggtagggcgggataggatatttgttttgttatttttttggtaattaaaagggtagagtgcgtcgattgagttggagttttagtttttttatttgtaaatgggcgcgttggatagatgattatttgttttttttgcgttgggtatcgtgcgtagttcggtgtatcggtgtagcggggtagatatagggagtcgttttttataattcgggtaacgtaggtagtggtgagaggatgtaaaatttgtacggaagaattttttttatttggatatttttaaagtttttacgataaagcggtgtttttaacgtatagaggaagaagtgattaattatgattggagggtggtgttagagttttattgaggcgaaattaaaatagggttttaaggaatgagtaggaattagttaggtagttaaggtgatggaaggtagttgttttcgaaagagggaagggcgtggcggagtttgggaggtttgaggtattatagcgagtgtggagagatagaggtagggtcgggtttttgtatagttgttaatggaggtcgtagaggacgagaggaaggcgggaggttagttgggaagcgttcgttagttttgggtaggggcgtagtattgtttttttttgtagtttttttaaaaatgtataggaggttgaaagtgttattaatagtttcgaaaaatttttttttttttttttttttttttattttttttgggggtttaagaagtatttttattttttgtttgagtgtgggaaatttatatgtatgagaacggaggtttatgtggtatcgtgggttcgtttcggtttatttgtttttttttttgagtaatttgtttagttatagttttgtagagggagtagtttagttagaggagtttttttttattttaggtagagttgattggatcggagtggatattggattttaattgagtttatttttttttttatttgggggttagaggtttaggaggtttcgggagggaagtgttgtaagggaggggagtagggagtatggacgaattgtgaatagcgttttggattttgggatgtttatattttaatcgtaatttttatttatacgtttatttatcgtttgtattagtattagtagatttcggtttaggtcgtgttttgatttggttagtaagtattatgatgatattgtttttagtttagttatgatgatattgttacgagtttaatgtttgggatttttaaagtttagcggtgttttaagaatttgggttatgggtgtattgttggttttgtttattttatttagtataagttagaggtgttttggagtatagttattttgaggatgttagttttggttgttttttggttttgggtaggtgggtttttttgcggatgtttacgtttttgtttggggttataatttataggaatttgggtatttaggatttaaggatatttgcgtggagtgatgttggatatattatatgggtgttttttgtgtgatggtttttggatattcgaatttttttttcgattttaagaaattagaaagaaggataagagagagggagggaaggttgggaatgagggttttatatatttttgagatgtatgaagtttaatttgttatgaaattagagttaaaaaaaaaaaagaaaaattaaagagatgtacgaagtttaattgtttaagttttaaattttgtttttatttatttatttttattttttattttttgagagggagttttgttttcgtcgtcgaggttggagtgtaatggtgcgattttagtttattgtaatttttgttttttaggtttaagtgattttttagttttagttttttgagtagttgagattataggtgttcgttatatttggttaatttttttttttttgtaattttttttttttttagtagagatagggttttattatgttggttaggttggttttaaatttttaatttgaggtgattttttcgttttagttttttaaagtgttgggattataggtgtgagttatcgtatttggtttatttatttatttatgagatagagtttttttttgttatttaggttagagtgtagtggtatgattttagtttattataacgtttatttttcggatttaagtaatttttttgttttagttttttaagtagttgggattataggtatacgttattataatcggttaatttttgtatttttagtagagacggggtttt

SEQ ID NO: 7 - DNA, 52626 bp, Artificial Sequence
  chemically treated genomic DNA (Homo sapiens)
ggaggaaggagaaggagtttattgtaaataataataattaaatagtttgggttgggttagtaaagggtgttttgggagtgtttggttatttttgtattttattttgttttatgtttgggtttttatattttttttttatttgtgtttttttttttttaaaaaagatgtaagtgtaataatttattttaaaaggtaagaatgttttttttaatattttgttataatgtagttatatggtggtataggtagtaaaattttatggaattgattttatttttttttttatatttttttggatttttattgtatttttaatatatatttttaatattttattttaggttattaagttaaaggaaaagttgtatttatatagggttaaaatattttataatgagaataataagtaatggttgaggtttatgttttttttagtatttagttttttttttttaattattgtatatttaaatagatgattagatattgaaaattgttttttaaaattagtagtataaaggtttagttttatgtgtgtgagtgaagagggaagaaaggagaggttgaggttaggttatggaagtattttttttttttatagtattttgaaagaagtgaagtggggttgatgggttattgttatttttttattttttaattggatagttatagagtattattttgggggttagtttattaattatttttttttagttaggtttgtttgtttttgtattggatagtaagggttatgaaatagattaggaatttttgtgtgttttttaggtttttgaagatggttttttattgtttagtttagggagggaatgattgtataagtagggtatgtagtttttatggaagtgttttttgtttgtttagttgaaatgataggagatggggtatggagttgggtttagtgtgattatagttgtgtgtgttggggatttattttatatttgttgtatttattttattgtagtgtttttgagttaatttggttattgtgttttttgaagttggaggtatggtagtgagtgttgagaattaagtatagttaaaagaatttaaggaaagttttaaaagtttatgttttttaagtgttattttagttttggagataagtttttttgtgtgttttttagagtttttgtttttatgttttaggagtagtgttggtatttggagggtagtagtagtattttagtgttaagttttgttatgttgagatttgtgtttagtagggattggaggttgttagtgtggggaggttgtttatttatttgttggttatttatgattttatttttaagttgttatttttgttgagattttaggtaggtatttaaaggaaatttttattttttttagtttatttgtatagtaatgaattatgtggtaggtagatgtttttttttatttgtttttatgagttttagttttagatggttttgggtagttgttttgatttgtttagttattttaggagttgatatggtagtggttttttgttttgtagtgtagaaggttgggtttagttatttgttttggaagggattgggttttaaggtttttttttggagaattgagttgttgagtgaatgtttatgaggtattggagaggggagttttatgtagtattggttgtttttggtgttaatgaagtttaggtttttatattttgggtggtatgttttaggttttttttttagtttagttttagggtaagtataggttagggtagttatgtttttattttgggttagggttttttttgttgtgaagggattggattaattagagggtttttaagtttttttttaatttggtggttttattatatttagtgtggttaggtggtttttaagggttgggttaagttatagaggataggtttggggtatgtggttgtttttgatgagatgaataggaatgttttatattggtatgtttaattttagatattttttgggtgtgttgggataggtagttatagttatagagttttttaatagatgttttttttttttaagtttttgggttgaaatttgtttgatttgggtttagtttagttagagagtagatgtatggaggaattgagtgttgggggttattgtggaagagtttttttaaagtttttattttttttttttgtttgttttggagttatttgtttgtttttttttttgttttgatttttttgtttttttttttggtttattttggagttatttggttttttttttttttgttttgatttttttatgggtgagaaagatttaaggtgaaagttttttttttttttatttttttttagttatgagtattttagaaggaaaggggggagaaatggggaaattgtttttagttttaagttttttttttttttggttagattttgggggagtttgggttattttagtgaattttagaattagaaaaaattttttaaaagttattttaaatttttaaatatttgaaatatttaaagttaagtttttaagaatatttaatttaatgtttaagatttttttatttttataagatttattttagagttatggtttataaagaggtttgatttattaagggaggttatagttagatttttttttagtttggtttttagagtagatgagaatattaggtaggtgggagattgttatttttaattttagagatttttatttaataatattaagtttattttttgtttaatttaggaggtttttttgtgtttatgattttgagtatagtgggtttggttttattttatgataggaattaagggagaaggtagaaaaggtgagtgttttaatgtggggtgttgtttgttggagggattttttatttggggtttgataggtttgtttttggatggttattgtgtatttttagttgaggtgagggttggggtttagggttagatttaagttataggggttgggtaggtaggtatagagttttgttttttggaggtaggaagtttggttttaggagggtattttgatagttttatttgtaatagtaaagttatattgaggagtttaggttaggagtttttttgtaggttggagagagggtagagagttttggtttttgtggaagaagtgtaaggatggagtgtggaaagttgtgtggagaagagtaatattttttagtgtttggagggatatagagtttttatttgttgtggaaggttttgggtagtgatgatattgatagatatggtagggaggatagttagtttgaggttatagtagggtttggaggttgagtatggttatatgttttttagtaaagtttgtatgtagtttttgattttttgttatttggtttttaagttttagtttatgtgttttgaagttgtgagtttttttatgttgggatattgttgagtagttttagggaggggttagggtagggtagggaagagatgagtttttttgtatttttttggagggaatttgattgggttttggatggagaataaagttgtttagatttttttgttgtattagatgttaggtaggttggagagtgggaggattgtttgggtttatgttttatttggatgttttttttttttttaggattttttttttttttagtattatgggagtttttgtggtatttgtgtttttagttttttttaggtttggttttttttttatagtgtttagtgaggggttggtttgtgttttttttggggattggtattgttagatggtagtaggggtttttggttttagtttttgttattttttgtttattttttttaggtgtatttagtttaggggatagttaggatgtagttagttaggttttgttagatttgttattgtttggggggaggtggaggttggtgttttggttttagtaggttggattttgtgtgtttttagggagagaaagatgggagggtaggaggttggttttgtagggtagtttgtgttttagatatatagttattggtttggtgattaggggattttattaggagtgggaaggatggataagattgggttggtgaggttgttgggtttgtatggaaatttagtattgatttatggttaattaggtagagtagaggagtgggtgggagtaagaaagtgtttttagtttattatggatgtgaagttgaaaaatgtggttatttggttttttttattgtttgtggttgggagtaggggttagggttttagtgttagggaggggttaggggtttgttgtttttttttttttagtagtttatggggttttagatttggggtggttgaaagtgttgagggttaggtttttggtttaggttaggtttttaagaggaaagttgagtgggaggttgggggtttggaaaatatgggtgtggtttatggtgttttgaggtggggatggggtaggggtgttttgttatgtggtttaggaaatggttgtattgtgttttttggtttttatgtggagggttgtgatgtttgaggttttgtggtttggtttgttgttgagtttgtagttattgaggtttgggttgaggttggttgttttaaataggttgtttatgtgtgtttggtttatgtgattgttagttttagatatatttaggaagttggtgatgttgttggttttagagttaggggggtgggtatgaggggatatgtaggtaggtattgggttgtaggggattatgtaggttggtattggtgaggtagttttgttgttgttgagttaggatgggttttgaatttgggagaggaagggagagatgttattggttggtgggtaggtgtggtgtggaaggggtttgtttttttttttagagtatttttttttttattgtttattttttttatgaagttttttttgagtgtttagttttgatggatatttagatatttttgtgggggtggtttttatattttggtatttttgtttttagggttaggttagtagtagagggaaatttagttttaaagagtgattttaggttttattaagggtttagtggaagggtgatattttagtattttttagttggttttttatttttagatttaattgtagatttggtttttatttgtggatggtagttgtgttttatttatttttagtttttttttaggttttttatatttataggtatttgagtaaggtgagtagattttaatttggagagttttggttttgtaggtttttttgggtttttattagtagtagggaagatggaggggttgggtgaggtgggtggtagggatttaaattttttagaaattaagggttagtggttgaggttttagggtttgaattaggaggttttagaattaatttaggatggaaggggttgttttaggagtggatagttagatttgagattggatttttttgtgttaaaggggtgagggtatgtgtagggatgagttggttattttattttttatttgtgttattgggttttttttttttttttaatgtttatttggggtttttatttttttttattttttaggtatgtataaggaggtagaattagggtgtgggggagatttgggaattttttagtttatgtatatgggatttttggtaattttatgtgggtttttgttggtttgtttttttgtatgtgtttggagtatatttgagggaggtattttaaagtagggagaaagagtttagtttttattttggagggaattgtatttttttttgtggtgtaggggaagggggattggttggtttttattatttttttttagaagaggtttgagtatatattatgtggtgttgtaggtgaggtgggggtaggaggggtgaatagggttttgtgttgggttttttttttagttgtgtgtttaggtagtagagtttaaagttaaggagggagttagagttttattttgggaggatagagggaggttgagtttagggagggagaggggagaaagagaatggaagaatatagtgtgagttgatgttgatggtgtttgtgtgagatattttatattttttagttttatttttaggtttgtgttttgtttttttgttttatgaattttgggttgggggagagggaatagagggttggtttggttggagagttagagattatttgttagtatagaattaggttagggagaagtaaaggaggtaggggtgtttgtgttattggttggttgttgagtagggttaggttgggagttgaggtggaggttatgttagaatgaggtttgagtaggtagggagtagttgtttttgttgggtaggttgagtgggggttaggagaggatttggatttggttaaaaatatatttttttaagtattttatgtgtttgatgtgatttaatattttttattttttgtattttatattagaataggggattggttgatagatatttagggaaaatgttttggggggaggggaggatagggttttagaagttgagtataggtatataagttttttgaaattgtataatttataaaatatttttgtatgattgaatttagattttataattgtttgataatagagttgagtagatgtttttattatgtttaaggtataggtgaagaaattgaggtttagagatttgagatttgtttaaagtgagaaagatttggagttggaaagataatttaagtttttggatttagaattttaagtttattttaatttggttatgagttttggagattttagagtttgttttttgaagagattttttgagtggtatttgagggtttggtggttttttgtttgttttggttttgatgtttatagtaaaagtggttaaagttagtggaggaaagagttgtttttattgttttaatttttttttttttaaagtttagttaagtttggtttaatgattagttggatagattaattttgggttttttatattttggtataaataggtatatttttggaatgagatggaagggtagtttggagttataagttattttggggtgtttgggtttttttttaaggggtttatttttagagtattaggggttggggattggtggtggtagtttagggtgggatttatttgggtgtagtttttagtttgggtgaggaggggtagtttatatgtagtggagaagtgggtttgaatttgttgtatttgtttaaaatgtttttgttttttttatttggttttttggttttggaattagatttataagatgtgaaaaagttattgttattagggtgagatgtttgtttggaggttttatttttaggtagtgtaaattgtttttttgagttttttattagttgtagtgtgtttgggaaatggtgtggttatatataaatattaattttggtttttgtttttaagagttgataatttagaattatttattttgagttgggaaggtattttatttttattagttatgggtgtgattttgagttagaatttttatttttttaagtttgagaatttagagtagttaagtgttattatttataaaataagttattggttattttagtagttatttaagtagatttttgtggagaagttgataaaagttataaatgtttttttagatgtgtttttttagataattatatatagttttgttatagttttttaaaaggtttatggttttttaaggtttattggtttagatttataatgtttttttttttgtattttgtttgtagtttttttgttggagatagttttttagtttagaatttttttgtgttaaagggagaataggggttttgttgggtaatagaggtagttagggaagattttttggaggagggataggagttgggttttgaatggttggttgaaaggaggaaagttaaggtttaggtttagaaatagtaaggtatattttaaaaatttaaagaggttaatttgaaggaagtggtgggagagaaagaaatagagttagattgtagggggttttgattgttaagtgaagggttttttttttggtgttgtttgtagaggtagttgttataaaattttgtgtagaagtgtggtttgatggtgagaggaagtggaggttaatttgttattgagtataagtggatgggatgttggtttgattgggagtttaatgggggaggggaggtttttgagttagttgtgagtattggggtttttggtgatggggagtattgggttttttttttttgtatgagtatttttggaaggttgagaatttttttaaggtttaagagtaagagttgttttatttttggtttatgatttaggatttggagaaggggtgatggggatggggtgggtgagagagggagagtgaggagggattagtttttaggttaggaatggttttaggttgatttagagatggattgtggtgttttttagagggaggtttttgttagtttgatgtgtatttgtttgttggttttgtagatttagatgtaagtgggtatattttagatagtatgttgtagattgggagaatagagttatgataatagttttagttgtagagttataaggagttttgttaggtttttttaggtttaggtattaagaaagttaatttttttgaggtttagtttttgttttttaggtggaaatatttttttatttattatgattaatgtagttgttgagttaaatataggagttagtttttaaaatttttttgttttagagtttttgagttttttaggaattattgtgaggaggggagaaggaggtgtggatgtgtttttttatagatgttgtttggtttttttgggtatttagtgtagttggttaatggataggtttataggagtattggtattgttaagggttttagtttttgtatggtgaatggtattttatagttgtagtaggggagatagatgggaaatgtagtttaagaatgtttagagtattttttatttgtttttttatagtttttgattttttttattgttttttgttagaggaaagaggttaaggaagatggggatgtattttatgttattgtgaggagggtgggggtgagtaggggtgtatattattatgtttttttatttttgtattaatttatttttttttttttaattttaagtatgtgtgtgtgtgtatgagtgtatttattagtgtggttatatgtatgtgtatgtgtgtatatatattgattgggggaggagaagttttttttttagaaatggattttttttttagtttggggttttagtttttgttttggttttttagggtttttttttttttagggatttttagggtttaggttttggttgtttattgggagttaaggatagatggggttttttttttgtgttgttgaaatgggatttttttttattagtggtttgggatgggagattggggttaggatgagagaatgaattagaggagtttgtttttattttatgtttaattttttgtaggtttagttttgtttttttgttttttttttagttttttagggttttttgtgggggaagttggggggaggggagaagttattggaggtatggagagagatggtttttttttttttttttgttattgtgattgttggggttttttttgtgtttttgtgggttttaggtttttatggtgggattgtggaagtggaagatgtttttataggttttggaatagaggatttagggatgggtggggagggattttgaagagggaaggaggtggttagtgtttggtaaaggggtttagagtggagggaggagttatgtgggggagtggaatgtggggtgtgggtttgttggagttgagtgtgagggaggaggagatgtgggttatttggggaagatagatgattaggtgggggagaggttagtagagttagtattgtttttggaataggagtggaagaaggttaggttgagggatttatttgagggttgaagatggaaatggtgagaggtgggtgagtgattggtgggagtagggttgtttattttttttttttttttttttttgtttttttgttttggggttttattttgtgtatttagttttggtttttttgtttagatttagatatgagttaggtgagtttggttggtttttaatattttttttagtaaattggaggtagtaagggtatttttatgattttttttatgtttatatttgtaggttttgaggtttggagtgtttatttatttttgatttttggtgttttaggggttttgagagtttttttttagatgttatattaatttttatgtttgtttttgtgttttttagttttgtattgtaggtttgtttttattgtgtagttttaggaggatagttaattatgaggtttttattgtttttttggtttgaatgttatattttaggattattttagtttgggtttatttagtataggttttttttgaggattgggttgtgtaaggaattaattgttttggtggaggttttgttaattgtagtttatttggggttagggtggggtggtttagggtggggaggtttttgttttattgtttttagatattagttgtagagattggaattttagatagtagagagaggtttttgtagttttttggagtagggttaaattttaggtttttttttaggaaaagtttattttggggtttttattgttttgtttttgtttttattattattttatgttaggtatttggtttgttattagttgagtatgggttttgaataaatatagtagaggtaggtagggggttttattattatttttttatttttttagggtattgttaggtttagggtttaatttagaggtttgatgtatatgaagattttatttattttgttgtttttatataaagaaaagtttttgaataatttggtatgtgtttttgtatagtaaattaaagttaaagaagtattaggttgtgatttaggagttttggattttagttgtagtgttgttattgagtggttgttgttaattttaggttatgattttttatttatgggtttttttttttttgtttattaaatgggaagatggggtgattatttttagtattattgttttatagttttgtggtttttttattaggtgataagatatgtagtatgttagagtttttttttttgttttggttgttaggaagttttaagttgaagtttgtgtttaatggtaattatgaattttagtttaaatttttttttattatattatttttgtattttatgttattgtttttgtttttagattgaataaataaatttttaattgtaagttattttaattttattttggaagtaggtataagtgtgtgtgtgtgtgtgtgtatgtgtgtgtgtagagaatattttgttttagttgtatggtggtaattgaaaaatgttttgtgtgtttttgtttttatgttttgtatttaaggtgttattttttttttagtatttagtgaattttatttttgggtatttttatatatttgttaggaagtatgtatgtaatttatatatgtaaatataaatgtatatatatattgtatagaaaaggaataggtttattttatattaatatagtatttatagggttgttttataattagttatgtttttttttttatttatatttgtgggttttttttaatttatttgttggagattaggttagatgttaggatttttgtttaaatttaggtatgtaaggttatgtgagtggttggttgtttaaatttaagtgagatttgggtgtgtgagggtttttggatttataggaaagttttagttgttttgttattttttattaaatatttattaggtattggaggggaataaaatggtagttttgttaggtgtagtggtttatgtttgtaattttagtattttgggaggttgaggtggtggattatttgaggttaggagttgaagattagttaattaatatggtgaaattttatttttattaaatatataaaaattagttgggtgtggtggtgtatatttgtaattttagttatttaggaggttgaggtaggagaattgtttgaatttgggaggtagaggttgtagtgagttaagattgtattattgtattttagtttgggtgatagaataagattttgtttaaaaaaaaaaaaggtagtttgggttgggtatggtggtttatgtttgtaattttagtattttgggagattaaagtaggtgtattatttgaggttatgagtttaagattaatttggttaatatggtgaaatttttatttttattaaaaaataaaaaaaattagttgggtgtagtggtgtatgtttgtagttatagttatttgggaggttgaggtatgagaattgtttgaatttaggaggtggaggttgtagtgagttaagattatattattgtattttaatttgggtgatatagtgagattttgttttaaaaaataaaaaaataaaaaaaaaatggtaggttgtttttagggaatttatagtaatttaattgtgtagttttttagtattatttttggtagttgtagtttttgaatagttatatatttattgataattattagtttttttttatattagttattttggaaaaaaagtttgtagattttattagagatgtttttgtttttttaaatagaaaatggttgtaattgatgaattttttattgatgttttagaataatgttgttgaagatgtttttatgagttaatttaagagtttttggggtttgttgaggattgtagggttggggtatttttgttttaatattgaagggtttagtttattgagttgtatggtgttttgttgattaaaaaaaaaaaaaaaaaaaagatttttttttgttttgaagttattgatttttttggtttattggagagggaaaaattgttatgtggtaatgttttatttgttatttttaatatgttttgggttggaaaagtggattgattatgatatttattttgtgttaaattgaaatttaaatttgagtgtgtgaattttgttatttgtattttggttatttatgggttttttttttttttttgattttttttttgttgtgaatttatgttggttggggtagatatagttttttggataagggttgattgatttatggatatttattttttagatttgatgttttgtgtttggttttttttaattggtgggaatatagtgatgaataattagtgtttgattttaaggaaattatagtttagtaggaggggataaataagtaaaataatgtaagttagttaataattttgtaaagaagataaaataggagttgggtatagtgttttatgtttataattttagtagtatgggaggttgaggtgagggattatttgaggttaggagtttgagattaatatggataataaagtaagattttatttttataaaaaataaaaaaatttattttaggtgtggtggtgtatgtttgtggttttagttatttaggaaattgaggtgggaggatttattgagtttatgaagttaaggttatagtgagttatgattatattattgtattttatgttgggtgatagagagagatttagtttttttaaaaaaaataaataaaaatatttaaaagataaaatgggtttaggtatggtggtttatgtttataattttagtattttgggaggttgaggtgggatgattattttagtttaggagtttgaggttgtagtgagttataattattttattgtattttagtttgggtgatagaatgagattttgtttttaaaaagaaaataaaaaaaatttaaaaaatttttaagaagataaaataggatagtgtaataaaaggtgagttggtttgtttttgttgtgttgggttgggttgagttttattgggttgtgttgagtgggttgagtgtgttaggttttattgtgttgtgttgtgttaggttgagttttgttggaatgtgttatattgggttgtgttgtgttggaaggggttgtattaggtttagtatgttgagttttattgtgttgtgttgggttgagttgagttttattgggttgtgttgtgttgggttgggttgagttttatttggttgtattgagttgagttgagtgtgttaggttttattgtgttgtgttgtgttaggttgagttttattggaatgtgttatattgggttgtgttgtgttggaatgggttgagttgggttgagtgtgtttagttttattgtgttgtgttgggttgagttgagttttattgggttgtgttgtgttgggttgtattgagttgggttgagtgtgttgagttttattgtgttgtgttgtgttgagttgagttttattgggttgtgttttgttgggttgtaatgagttgggttgagtgttgggttttattgtattgtattgggttgggtgttttggttgttggttggtaataggggggttattgttttagttatagtggttaggaagattttttagaggaggtatgagttgggatttgaaaaatggagggggatgtagttatttaggtagaaggaagagttaaattgttttttgtttttgtttattgggatgttgtggatattgtttttatgtttgttttgttttttgtttaagagataggttttttagagtagggataagtaatttttttttgtgtgaaagagttaggatttttatattgtgtaaagtttagaaatagttagtagtagtttttttgtttttttgttggaggtttttttttttttgtaattttttattatagtgtagaagtttaatattaaagaggataaaagtagagttgttttagttgggataggggtatgaggggtaggttaggagtttttatttttaggtttttaatgaattgaggaaaggaaagttatggtgtggttggtgggtagttaggagattttaattgtagttaagagtttagggataggttttgttttattagttttatttttaggtggtttttattgatttgtatgtgggttttagtgaggtttgtttttatggttagttgtttttgtgtatatatgtttgggtagtgggttttttggaagattttttttagtttttttagttggtagttggtgaaggtggtttggttttgttgttttttgtttttgttgttttttgagttggttttttttaatgggttggggaggtttgagttggtttggttttggggtttttttattttagtttttttgatatttaggtagttgttgtttatttttatagtgttagagttagggggtaattttggtttatttagggagttttttttagttgagggaggaggaaataaagttagaaattaatggttgaattaaataagagaaggggaatgttagggggagagtggggtatttgggtagttattttttgtttttttttttttagagtttattggatgtgaggtttggagatttggtttttaattttggtttgttattaatttgttgtgtgattttgggtaaattttttttttaatttgagtttttttattattattttagattaggttttttttagtaataatgttatgtgaatttaaggtagttaatttgatttttgtgatttttaatttttattttattgattttgagtttttttttttagagggattttttgtattaggatttttttggggtttgagaattttgattttagtgttatggtttttttgggtggaagggaaatttatttagtagttatgtttggtttagtggggtttggggtgaggaggatttaggattgaggtagataggagtgtttttttttttttggtttagttttattaggagtttagtaggagttgtggagattttgttttaagagtttagtgttgaggagttaatatttttttttttgttttttaattttgtatattggttttatttattgtttaagagaagggttttttttttttgggggtgtatgggattgaggtatgggttatattttttgttataagtagtttttgtttattgtttattgaggttgtttgggtatttttatttttagtatgttgattttgggtttgggtgggtgtatatgagtatagtttttagttattgtgtttggtagatggattttttatttattggtatatttttagtttaggattgtaaggatgagttaatttatatatattaagaaagaagaggtggaggttggggtgggagagtgaggtaagaagttattttattattatatagtttggtgagttttttaggtagatatatttattttttggtagagggtttgggataatagtttttatttttttggtattagggattggttttgtggaagataattttttttatgggtggagaaggttgtggtggggtatggtttggggatgaaattgttttattttaaattattaggtattagatttttttaaggagtatgtaatttagattttttatatgtatggtttatagtaggatttatgtttttgtgagaatttaatggtattgttgatttgataggagttagaatttgtagtaatgtttgtttatttgttgtttattttttgtgtgtggtttggttattaataggttatggattggtattggtttatagtttgggggttaaggatttttggtttaggttatggatttttgatagttttgttatgaattttatggttatgattttttagttgtgtgtttaggagagtttatttatttgttatgtgttttagtttttttttttataaaatggggatgaagatatttttaggattttttttatagggtagttgtgggaaataaagaggttagtgtgttagttatgtagttttgttattattgatatttatatttttagtttggatttgtaaatttatagattttgtgaatattagaggattttgattttggagaagttttttaagtatgtaggtttttgggtataggagtatgtgtagggtgtgtatagatgtttagggaagggtagttaattgggtgtttgtagatgtgggtgtgaattttttgagaattgtattttttgtttgtaatttggggaaaaggaatttgttgagtgaaagaataaatataattaataagatgtttggggagtatttgatatgattttttatgtgtatgagttttgattattataataagtatgtgtggtaggtgtgagtattagttattttgatttgtggtttttttttttggaaataggtttaagtgatgggtattaagtgttagaatgatgtttttagtttaggttttttgattttatttagattttgagggttgaagttttagatttgttttatttttggttttttgtgtatattggggaagttgagagggatatttggtttgtggtatttttgtttttttttttaaggtattaaggaaagggtatagaggtgagtgtttagagtaggtttgaaagtagttttaggaggttgtttttgagggttattggtagtgtagatgttatgggggtgtatgattggtttagtggtattatgtatgatatttgtgtgagtttaggtatatgtagatagttatggttttagtgataatattttgtaaattgtagttggtagttgggttaagagtttttagtaaagatatttatttttttggtagataaatatattttatgttttaggttttttttttttttttttagaaattttatttagttttataaaaataattatttttgttttgtaattttttggaagttagatgaggggttgagggaggtgagtattgagttttgagttttgatttttaggttttattttatagttttatagatgtttgttggggattgggattattttgtatagtaatgggagttttatgttataggaattgagagttggtatggattagtttgaatttttagttttaattggggggaaattgaggttagagagagaagggaatatgttttaattttggatagagtatagttttttagtttttggtttgttttttatttttttttttgtggttttaggttttatttttagggagagaggtaggggtagaaggaatttaggggttttatatgattaaggtgttttgttttgtttattttgtggggggtaggattagtttttgaggatgagggagtgaggatgtggtttgggggtagttttttagtattgagttagtttttggttttttaggggaagtggtagaaggtttagtttttatggtgataagtaagggtttagttttgtttatttttagttgtttattgagattaagtgagtaggtagagatagaggtggtatagggtgtgtgaagattattaggttaagagttgggagttttggttttggtttttgttttttttaggattttagatgatttattttatttttggagttttatttataaatagggagagtggggtagttgagggtttttttttttttgtttattagtagttaggattgtttttgaggatttggggaggggaggagagggggagggtgtgtttgtgttagagatggaaggaatttaggggagtgttgtttttggttttttaaggaagaaggaagtaagttttttaatttgttttgagttagtttgttttaaattttgaggttgggttttttatttagataataaagaaaaattttttgaagttttgtagttttatttaattggttagaataataagtatagtttttttagagtttgagttttaagattttaagtttaggttgtttatgtttattttttgttattttgtagtatttttatttggtgttggttttagtttagggtagtagggagtttattgtttttaggatagtagaattatttatttttagatttagtttatgtttgttttttgtaggtttggtttattgattttagttttaattttttagtgtttttttttatgatagttttgtttttgtggatattgggaggttattgttatttttttgagttttttttttttttgtagtttttattgttgttttttgggtggttttgagtttttttggtttgtgtgagatagagggtggtagggatgatatgaggagtggggttgggttttgggtaaagttagtagattgttttttagggagatgattttgggttggttggagtgttagtatggtagttgaaggtttgggtgttggttagatttgattttttgtaaggtgttttttttagtaagatggttgttgaaaatagaagttttatggtttaggttgattgtttttgattaaaggaaattattgattttggttttttaagtttttattttgggtttttgtttggtatgtttttttttttagttgatttttaagatttaatgtttttttaggaagtttttttagattgtgattgttttttattttttgtttattttttttattgattgtttatgtttgttgatttgtaattttattaagttttgaatgtttagttttttttatagaatgttagttttttaggggttgggattttatgttgtttgtttttttttagtttgaggtttagtataggataggttaggtggtagagatgtagtaagaggttgttgaggaataaatgaataatttttaattaataaatattattgagtttttgttttgtttaggtatttgtgtgtatttttggtgagttgatgttttatagagtatgtgtagaaaatgttttttgagtaaatgaattaattgttttatttttttatttattggggagaaagttgggtgggatatattgaaaaagggtatgtaatgatgaatgttattatttaaggttgatagtataaatagtaaaggttattgtgggagataggagagaagaaagatttagatagattttgagtgatgtttttatgtagagagtaagggatagaaggagaagtagagatgggttttataggggtggttttagaattgaaattaaggtttagaaatttagtttaggatttgttaggaattggttttatatttattttgttattatattggggtagagaagattgttagggagtttttagtttgtttggatgttgggtaagttttttttagagttttggggtattttgtgttggtataaggttgagtagtaatagtgtttagtgtgggtttaggttatttgttaggggttggattttttatattttttttggagtagttttttgtggatttggaaaggttttatgttgatgttttttttatgatgagtttgttttagggttgaggttatggggtttaagataatgtagttttaatttgtagttttttagttttgatttggaagtaaatttttgattatttagagttattaattaagtagtgaatttatattattgagagtaatgtttgttttatggagggtgttgtgtatgtagtgtggttattatggtatttagtgttttttaaataattttaggttagtattattgttatagattgtttttgatgaagtgggaagtatttagtttaaggttgtatttttaattgggagttattgagttttttaatttttgttggaattttttttggggggatttttgtattattgggagttgttgtttttagtgttgggaatttttggttgttggattttagttggagaaatgtatgaagtggaaagttttgttttgtttttttaatttttatttatttgttttggtttaatttaatggtattattttaatttagttttatttttttaaaataggaaaatttttgagaggtttttaaaggtgattgattttttttttttttttttttttttttttttttggttgtgatttaaagaatgattttttagagttattttagggagagggtgttggtagtatttgtatgtatagatgtatatttgagggtttgtggtataagtttgttattgtgagtgggtgtggggaatatatgtgtagttgtttgtggataggtttgtggagtgtgtatgtttgtgtggttaagtgtaggtatataagtgggatgtgtgtttttgtgggtagttgtgtgtgggtgtagatttgtgtgggtgggtgtggatatgggtggtgtgggtttgtgtggagttgtgtataggtttatgtatatggtgttaaggggttttagttattttattttttatggttttgattatatttattttttttttaaatatttgttttgtgggggatatgttgtttgttttgtttttgggtgagttggttttatatattttgtggtggagtgtatatattgatgtaatttttttaaaaaaaataggttagtatgaggtttttttatgttattgaaagggtattgattaaatttattgttgtttaaatggttttgtgggggtgagggtggaggttaaagtttagttattgattatgtttttattttattttatttgatattggggtttgtttagagtttaatttgaatgtttttaatttagttttagttttaataaataatgttaaaggggtagtagtgattgggtttagattttagtatatatgtatggggtatagttgtttgtagagatagatagtgttttggtttttaaggggttgttaatttttagtagagggtggggtggaaatggtagtttttaggttagttagtggtataggttattttgtttatttatagttattaatttaagttttgaaatgtttttgaaataaggaaagtttgagaaattgttttagattagaggaggttaaggaattatgaggattaagtgtaattaatgtgttttggggggaatgttggaatagtaaaaggatattgggggaagttagtgaaatttgaataaagtgtggagtgtagttaatagtaatatttaataaaaagtgggtaaaatattttagtagatattttatttaagaagatttatagggagtaaataagtatgaaatatgtttaattttattatttattatggaaatgtaaattaaaagtataatgagatattattatgtgtttattatagtgggaataagatttgatgatgttaagttatggtgatgtatggagtatttggaatttttatttattatagtgtaaatatttgggtggtgttttatttagttaaattaatattgattttatgatttagtaattttatttttaggtatttattttatagaaataatgatttattttaagaggagaggaatttaaatttataggtaaatgtttgtagtagttttatttagaattattttgaaatggagatatttttaagtgttttttgataggggaatggagatgtaagttgtggtttatttaggttatggattgattttatagtgaaaagaaagaattgttgataatgatatggatgaatttgaaaggtggttttagggtttgtaaataaagttagttttaaatttatatgaagtgtaattgtatttagttagtatatgaattttgggaaaggtaaaattatggggattttaggtaatagattattggttgttaggtgtaggaggagggggaaggtttgtttataaagggtttgtattggtgtgatggaattattttgtattttgattgtggtagtgaatatatgaatttatatatgagtgtgttaaaatttataaaagtatatattaaaaagttttttatagttgggtgtggtggtttgtgtttgtaattttagtattttgagaggtagaggtggatggtggattatttgaggttaggagtttgagattagtttggttaatatggtgaaattttatttttattaaaaatataaaaatttgttgggtatggtggtagttatttataattttagttatttgggagggtgaggtaggagaattgtttgaatatgggaggtgtagattatattgaattgagattatgttattgtattttagtttgggtaataagagtaaaattttattttaaaaaaaaaaaaaaaaaatttatagtatgttgtttttaaattttaaaaaatgtaattaaaaagaaaatataaaattgtgtttatatatataaaataaaaattaaattaaaagtttatatgtttttatttagaaattttatttttaggaatttatttaataaatgatggtaagtatttattagagagaatgtttattatgttatagtttaatatgtaggaaaattgatagtaattaaaatatttaataataggggattggttaaataaaggatgatatttttataaatggaagattttttttgatagtttttattttgtatgttgtttttttttttgagatagagttttgttttgttatttaggttggagtgtagtggtttgattttggtttattgtaattttattttttagatttaaatgattgttggattttggttttttgagtagttaggattataggtatgggttattatattttgtttatttttgtatttttagtagagatggggtttttttatgttgtttaggttggttttgaatttttggttttaaatgatttatttgttttggttttttaaagtgttgggattataggtatggattattgtgttaatattaggtatttatttgtttttttgttttttttttgtttattgttttttttttttttttttttatggagtagggaatatatttgaatatgtgtgttttgtttattttgttgtgtaatatttagtattatagttggtatgtagtagatgtttagtaaatatttgatgaataaatgaatgagatgatgttaagaaaggatagtgttttaatatatgtaaagatgtttaatttatattaaataaattttattttgattaaaaagaggaagggagtggagtatttgtttttagaaaatattataagtttttagaagtggtaatatgggtttatgggttaattttgttttttttttttttttggggggtggggtggggttggtttgaattaattttttatttgtttttttaggaataggttgaaatatttgaaagtagtgattagaattttggatggtgtatgttttgagagtgggttgggttttgtgttgtgggattatgggaagtaagagataagtattatttggagagatttagttaaattggaattttagataaatagttaatattttaaataatataagtatattttaaatatggtataagaaatatttttattttataaattatttattatttaaatgtagatttgattgagtaatttggttttgttgtttgtttgtttgttttttgttaaatttgttaattttgtatattaggtttatgtggtatttagggttttgaaggtaggattggtttttattagatttatggatttatatgttagttttttatttagtttgaggtttagagatttgtttttgttttgtagtgtattgtatgagtatttttaggtttttgtatttttgtgggtatttttttttttatttagtatgtttttttgttttttttgtttgtggttaattattatttttatttggatagttttttttgtaatttttgtgattttttttttgtattataaatgtaatttatgttttatatggaagattaaaaaaaaattaagatagattaaaagaaaattatttatatatatatatatatatatatatatataaatatatatagagaaaatattattttgtaaatttttgtgtttttttttgagatggagttttgttgttgttgtttaggttggagtgtagtggtgtatttttggtttagtgtaatttttgtttttttggtttaagttatttttttgttgtagttttttgagtagttgggattataggtatttagtattatgtttggttaatttttgtatttttagtagagatagggttttgttatgttggttaggttggttttgaatttttgattttagatgatttgtttttttgggttttttaaagtgttgggattataggtgtgagttattgtgtttagtttataaatattttagtaaaatttaattatattttgtatttttttttatgttgttttatatttttttattatattatttttaatggttatgtagtgagaataattattattttatttaatttatttttttttgttgggtttataggtttttatttgtttgaaattatagtaggtttgtgatttaaattttttaatatatgtatggtgatttttttaggagaagttttaagaattagaaatatgaagtttaattatttatatatttgagggtttttgagaaatatggttaagttgttttttagaaatatgtaatgtttttagttattatggtgtttttttttattttagagttaataatggttattatagtgtttttaaaatttttgttagtatgatggatgaaagtgagattttgttttttttttttttttttttattttttaattatggaatattttattttttgtttttttttgttgtgaatttttttttttgggtttttaaagtttagttaagggttatttttttttttttaggattttttttgttttttaaatattgaattttttgttttatagtattggtttatgggtttgttttttttttagattgtgagttggttagagtgggttttttagatgtattgttggggtttgggttttgtgtgagtaagggtttaggatatatttttggaattaatgtaaatgtttgtgtgtgtttgggttgagggagatttttttgggttttttttgtttttggtttggttggggtagttttgtaggtatagttgagggtggttagtgtgtttgtaggaaaaggttttaggttttggagttgggttttagatataggaggtttttggttttttgtatatattgtttgtgttaggaggttgttgtatggagttggaagaagggattttttaggatgaggggggttgaggaaattagttatagtgtagggtaggaaggattaaagatgattttggtagttttttggttttggataaattttttgttttttgtttgtttagtttaataatattgtatgaatttttgttagggaggggtatgagaagaggagatggaggggtatagttttgtgggaagttaagattgaagaggagtttttggttttggttgtttatttagaaggttaagtatttaggttttagggtttaatttttagtaggttaagattaagattgtagttgtgtatgttggttattaggaggtattgtagttttaataaagttattggatggaaggtgatgattttggggttttagtgtttaatgaggtttttagatgtttgtttgaagatttaggttttagttgggaggatttgttatttaagtagtaatttagttttattatgtgtttgttattattttagtattataagggataaagagatggatggggtgggttgttggttttttttgtaggggtttttttttttttagttttgggtatttttatatttttgttttattttagtttttttagaatttttatattgtggttttagtatttttattggatagatggttaaagtgaggtgttgagagaagggatttattagtgttattagtgattgagtgatagataggttgagatttgggtttttttttattttttaagtggtttttttttggagatttatggggattttttggttttttagagagggtggtgtatagtgggtgtttaggaaattgattaatttgtaaaagtttttgttttgtaaaagttttttaggatatttttgttgtttggtttagtggttttttatgtggttggtagatttgttattagtttttttgtgggttttttttgaggtaggtatttgttgaggtagggtttgttattttgttttttattgttttgtttttatatagaagtttttttagttttttttgtaatggtaggggtgagtggggaggattgttttttttttagtttagagatggagtgggttttttagagtttaggaatgaaaagggattaatgttgggtttttgtaaaaataaaaaataaataaataaattaaataaaattaggaattgggttttgtattttataaagtattagggtatttattatgttattagtagggttttagtttttttataattgttaggtttttattttatagttttagaaattgaggttagagggggtaaatgttttgttaagaattaataattgttaagaaggtttaggggtggtggtttatgtttgtaattttaatattttgggaggttgaggtgggagagttatttgattttagagttttatttagtttgggtgatagaggtagagatttgttttaaaaaaaaaagaaaagaaaagaaaagaaaataaaaaattggtaagaggtagagttgagatttgaattttatgtttggagtatgtttattgggtttttttggggtggatgttgtgggtgggattgggataggtagataggagatagggttaaggaggaagggaggaagttataggagaatggttgtttttagttgttttaagagattggtttttttgtaataatttttaaggttgtttttgattaaattgttttgttgaagattaattttattgattatttgggattttagatgtggattagtgttttgttttagggtttatatatattgaagtatttagaggtaaagaggtatatgagttatatgtttgtaatttattttttttttgtttgtttgtttttagataaagttttgttttgttgtttaggttagagtgtagtggtataattttgattaattgtaatttttgttttttgggtttaagtgattttttatgttggttaggttggttttgaatttttgattttaggtgatttattttttttgattttttaaagtgttgggattataggtatgagttattgtgtttagtttgtaatttattgttaaatgatatagttgtatattgtatgtatgtatattaatatatatataaatagagtatatgtatagagagagatatagagagagatttagagagattgaaaataatgtaaatatggtaaaatattattatttggggagttagtataaaaggtatttgggaattttttgtagtttatttataattttaagtgtaatattgtattaaaataaaaaggtttttaaaagaaaaggtatgtggattaatggaaagaaggtattttttttaggaattttttttgtgaagttggtatatgtaattatttgaataggatttggatgagtttatttggtaatttttttgttttttttttattattattattatttataattttataaggggttttgtatgttgtaataaaaattataagataaatgttaattttgggagtatatattgttttttagttttttggaagtttttatttttgtggaagttattgtgatttaattagaatatggggtttttttaagtagtttttttgagagttgtaggagattaaggttaagttattgttggaatttaaaagtttaaaaagtattttaatttttgagtttattgtaattttaattgttttatagttagtttaaatgagtaaagtttttttgtataaaaaaaagaaatggtggaaagaaagaattttaaattttgtttagtttttagtttttatggtttttttgttaaggtttgggttttttttattttttagtttgtgtttggaatttgttttttttgtttttttttttattttgtgttttgttttattgatttatttagagttttttttaggaattatggtttagtggaagagatgtatgagggataagtatggttaagtgttttagggtttttagggtaaaagttttgttttttagatatggtagggtttatagaaaggagtggttaattttggttgaaaaggttggagaaggtttttgtaatggagtggtttttgaattgggtattgttagttaaggaaggtttggtaaggtatgttgtattttatggtaaaataagatattaagatattatttttttattttaaatagggtaaattttaaattattaagttttttagataggagttttttaattagggttgattataattatgatagtaataatgtaatgttttgtatttgtgttgttttgatttatttattattttttttgattttttttagattttatgaggttagtgttggtatttttgttttatagatgagaaaattgaggtttagtgaagatgaataatttgtttaagattatatagttaggaggggtagattggatggttttatgttaagtttattgttttttaaggtggtgatgagttatttttttaatatggaggggttaggtaggttttattttgttttaagggggtattgttgagttattggggttatttttattttaaaggattagggtaaattaagttttagggtttttatgagaagtttatgtatgatttaatatttggagattattttttgatgttttttggggtgggatgggtgttttagttttagtttgggttttaagtgtttttgttagtttttttttttaaggaggttagaagttttttggttttttgttttatttttaagttttattttatggtgtgggtggttggatgagattttgtttttggtaggatttattgttagagaaatagagttttttatgtttttttttattttagtaatatgtttgtagggtttagagattttattggattagattttttttttatagttaagatgtggaggtttagagtaaggttatattgtttgataatggaagggttaggatttgaattttgtattttttgtatttagttttgtggtttgtttgtttattgttttttttaagttttttaaattatgtggttttgggtgtgttttaagatattttttatttaatttttttaagtttttgttttttttttgtagtagaaagaattttgtagttttattatttttattaagatattgtaatattatttttatttagaggttggtgagatggaggagtttagattttgtatgaggtaaaatgaaatgattgagaagtttttggggtaggataggtttgggtttggtttttggttttgttatttatttgttatattgatttatttaatagtatttttggagtattagttatgtattgggtaaagttttaggtggtgaaaatataaagtttagtaaaatatagtttttttttttaaatggtttgttttagtgataggggttatggttatagtgtagggtggtgattagggtaggggtatttagtttagttttggggtgattttagatttttgtagaggaggtgttttgaagtagtaatgttgttggagaggtttgttgaagttgtgtttagttaatgttttatataagattagggaatgttagttttttttatgaaagaaatgggagttgattaaaggagattattaaggaggtttttaagttattttgtggttttgttatagaagggtatttttggaaaagtgatttgatttttgtgtgttttagtttttttatttgtaagatgaggttgagaatatttatattttagaatggttgtgaggtttgattgaagtagagtgtaagatggtatattttttgatttatatatggtatttattttattaatgggatgttgttatgatatattaatatagttatgatttggggatgaatttggttgtggtagttgatagttagggtaatgttgtttagtttgtaattgtgttatttttatttgtttttttttttaggtgtattttttttagtttaggttttttgagtggtagtttttagaatgatatttatgaattataaatttttgttaaaagtagtttttagggttttttttaatgaagggtttattttatatatatataataaagattataaatggggtgaaatattggtaattgttgtaaaaattaaatgttaaatttatttggttatatagatttaaaaaaatttttaaagagtggatttatggtagtttttgtttttagattgtgtttttattaagggtaggggaggggtgttatgaggtagtgttattatttgttttgtttgttgttattgtttggtatttaagtatgtgttgaattgagttaattttaaataattgaatttttttttttttttttttttttttttggagatagggttttgttttgttgtttaggttgaagtgtagtggtgtgattttggtttattgtaatttttgttttttgggtttaagtgatttttttgttttagttttttgtgtagttgaggttataggtatatgttgttatatttggttttttgtgttttagtagagatagggttttatttttgttgttttggttggttttgaatttatgagtttaagtaatttgtttgttttagttttttgaagtgttaggattataggtatgagttattgtgtttggttaaataattgaattttttagtttgtagaagtagtatatgattttagaaagaatgtgttgtttttattaatattaaatttttttttttttaaatgtgttttttttttaatttttatttatgtatttatttatagagatggagttttgttttgttatttaggttggagtgtattgatgttattttggttaattgtaatttttgttttttaggtttaagttatttttttgttttagttttttgagtagttgggattattagtattggttattgtatttggttaatttttgtatttttagtagaggtggggttttattattttggttaggttggttttgaatttttgattttgagatttattttttttggttttttaaagtgttgggattataggtgtgagttattttgtttggtttaaatatatttattttaatttagagaattatttataaattgaaaaagtaataaggtttttttttttttggatgagaaagggaaagtaatggtttaattaattataagattgttttttttttttttgttgtttaggttggagtatagtggtataattatagtttattgtagttttaattttttgggtttaagtaattttttttttttagttttttgagtagttggtattatgggtatataatattatagttggttaattaaatttttttttttttttttttttttgtagagatgaggtgttattatgttgtttaggttggttttaaatttttggatttaagtaattgttttattttagttttttaaagtgttggaatataggtatgagttattatgtttagttttagtttgtattttaggaaagttattaatttttttaaagttgataagaatgggaaagattttttaatatttgttttttaaaaaatttatatttataattataaaatagttaataatttaaaatatttaaaggataattatatttaaaagttttggttggtgtttttgtataaatgattgggatttggagtagatgggtttttaggattttgtttattatatatagtaaggataaaatataaataattaatgttttagtatttataattaatatgttagttaaaaatggtttttttggttttgtatggtagtttatgtttgtaattttagtattttgggaagttaatgtgggtagattgtttgagtttaggagtttgagattagtttgggtaatatagtaagatttttatttttataaaaaaaatttttaaattagttgggtgtggtggtataagtttgtagttttagttatttaggaggttgaagtaggagaattgtttgagtttaggaggttgtggttgtagtgggttatgatttagttattgaattttagtttgggtgatagtgagattttgtttgagagaaggaaggaaggaaggaaggaaggaaggaaggaaggaaggaaggaaggaaggaaggaaggaaggaaggaagtaggtaggtagggagggagggagggagggagggaaggaaggaagaaaatggtttttttattgatttttgtttatttgaataaaataaaaaatttaaaaaagttttttttttaaaatgtatgatgtggttaggtgtagtgttttatatttgtaattttagtattttgggaggttgaggtgggtggattatttgaggttaggagtttgagattagtttggttaatatggtaaaattttattttaaaaaaagaaaaaaaaatatatatataatgtatggtgtgttttttttattaagtaaattttaatttatagtgaatgtgagataaatatattttttttttatttgttattattttttggtaggatggattttttgtaatgggatagattttttgagaggatattttgtgtagtataaaattgggttttgtggaatttttttttatggggttaaattttgggggatgtattaatatagtagagtttgggtatatatattttttgaggaggtttggtttttattgtttatttgttatatggtataagtaatatttttaaattggttttttgtttttggttttgttaatattgggttagtgaggaggttattatttgttttgtttagaagggtttgttttttttttttttatttataggagttgtttttatatattatatgggggttttgggttgggttggtttggtttttaggatggttttggagggaggagggagtggtgtttgggtggttaggggatatggttattattttagtagatgggtgaagatggtgtagtttatgtataatatgtagtgtgttgaaaattttttttagtgtattttttttattgtttatagagtttttatatgttggttaagtttgatgggtatataggtatgagggtatttaggtagtgggtatgagttttttgggtaggggaggaaaaaggttttttggttttaggagatttgggtttaatttatagtgggatagttttattttttttatttttaaattgaggatattaatattttttagtgggtttttataaaaagttttagtttaggtgtggttaagggtaatgtttattaggtgtttttttaattgtagatggggtttaggaagttggggtttaggaagggtgtagaggttgtttgatattttttgagtttgattttttgtgtttagttttgtgttgattagagaggaatatagtagaatttttgttttggggataggttgaagttttgggttaaataaatatagaaaatatatttagtagggagagagttattttttagtttatgatatatgtgtatgaggtgtagtagtttatggggaggaggggtttgaggggtttgggtggtttttgtttttttttgaagtttgtttttgttgtgttaggtagagatggtagtttttgttttttttattatttatttatgttttaaaagataatgttaattatatagtaattatagatttagtaataatttttttattttttaattttatgtattttagttaattttaattgtttgttaaggtttttggttagtttgatagagttaaggttttagtaaaattttattaattataatagttaatattgattgagtatttattatgttttaggaattgttttaagatttttatttatttatttatttatttatttatttatttatttatttagagatagagttttgttttttttgtttaggttggagtgtaatggtgtggttttggtttattgtaatttttgttttttgggtttaagtgatttttttgttttagtttttttagtagttgggattataggtgtttattattatgtttagttaattttttgtatttttagtagagatagggttttattatgttggttaggttggttttaaatttttgattttaggtaatttatttgttttggttttttaaagtgttgggattatagatgtgagtaattatatttggttttgtttttgtttattttattttatttaagttttattttattattaataggtagatatgatttttatttttattttataggtaaagaaattgaggtaaagaggttaattaatttgtttaaggttatttagttatgtgggttgaaatttgtttttaggttttgagttttatgggtttttttaaattaaaggtatttgaagtattaagtagtttgtgtagtataattgtggaatgaatagtttttatgattttttaagaattttagaaattatgttttagggtatatggttggaagattaggtttaagtaggtttttgtttagttatttaggttggggaagtttttaggaaggggagttggggatagttatttttttgtagttgtgttttttttggattttgttgtttagtttttggagttttagtttttggttgtgttatttattggatggtttagggtaggggatagggagttgtaagtgttttttttgggaatttaatagaaaatttttaaaatatgtatggggttaatagtatggagttattggatgttttttttttggagtttttttaagttttgttggaaggattttggaattattttaataaaggaagtggttttagatgtgtgtattttaggaggtgggtgtatagatttttagagtataaaagaatttttttaaaggttatgtttttatgggatggttaattgaaggggtagaggggtttttgaatatttaggggtttagttagggttaagattgtggttttagagtttttgtttttggttttgttttttatttttttttattagttttaggttttggaaaataaatgtgtttttgagttgaatttttgtgatttgttggttattggtttgtaggtaaggagatgaatggatggtttataagggtttttgtatattttgtaattttggattttatattagaagattatttaggggttagatagataaatgtaatagaatagagattagatgtaaatttttaaatatatgtgtaattgatttttaataaaggttttaagattggttgatgagaaaagggttattttttttataaatggtgttgggaaaagtggatatttttataaggaagaatgaagttggagagttttatgttatgttatatttaaaattaaagttattaaagatttaaatttaagagttaaattataaagtttttaaaagaagatataggtgaaaatttttttgatattggagttattgatgattttttgaatatgatattaaaagtatagataataaaataaagaaattgaaaaattgtatttttttattaaaatgtaaaatttttgtgtattaaaggatagtatttagggagtgaaaggataatttatagaatgagaagaaatatttgtaaattatgtatttgaaaaggaattaatatttagaatttttatgattgaagaataaggaaataaataattttatttaaaaatgggtaaagtatttgaatatatttttttaaaggagatatataaatggttagatgttaaaggagaatattgtatgattttatttataagaggtatttaaggttaggtgtggtggtttatatttgtaattttagtattttgggaggttgaggtgggtggattatttgaggttaggagtttaagattagtttggttaatgtggtaaaattttatttttattaaaaatataaaaattaggtaggtgtggtggtgggtgtttgtaattttagttatttgggaggttgaggtaagagaattgtttgaatttgggaggtggagattgtagtgagttgagattgtattattttattttagtttgggtaataagagtgaaattttgttttaaaaaaaaaaaaaaaaaaaaaaggtatttatagtaggaaaatttatagagagagagtagaatagaggttatttgggtggggggttaagggtgtgatggtggtttttgtttaataggtatggagtttttgtttgggatgatgaaaaagttttggaaatagtggtgatggttatataatattgtgggtgtatttaatgttattgaaaggtttatttgtagatgttaaagtggtagtattttatgttatgtatattttattataataaaaagtttatttttaattaaaataaagattttgaatgtaaaaagtaaaggttatattgaattatgtaaagaatatttagtttggggttttattgttttgtttagagttttttagtggtttttttaaagtttgaattttttggtagaaaataaatggtttaggggttaggtgtggtggtttatgtttgtaattttagtaatttgggaggttgaggtgggaggattatttgagtttaggagtttaagattagtttgggtagtatggagaaattttgtttttattaaaaatataaaagttaattgggtgtggtgatgagtttgtagttttagttatttgggaggttgaggtgggaggattatttaagtttgggaggtagaggttgtagtgagttgagattgtgttattgtattttagtttgggtgattgagtgagattttgttttaaaaaataataaaataaaataaaataaaataaaaagttttttttagttgtgtttttgttattttttagtttattttattggtatgtattatgtttttgtattttatatatttgttttatgttttttttttatttgaagatttagtttgtgttgttttttgagtttagagggttttttttattttttttagttggtgagtttttatttaatttttaaggtttattttgaatgtttatgtttaggaagttttaatttatttattttttttggggatttttatggtatgtagtatattttaattaggttatgggttttttgagggtaggagttagtttatttattgttaaatattttggtttttgtttgatatagaagtgttaggttgaaggatttgttggatgtaaggaggagtttttgttaggtgtatatttttttatgtattttttttgagttgttttttttttttgaattttggtttttatttgtaaaatggagatttaatttttttatttaggtttttggtgagatttaggggattatggatgtttaagtgtttttagattgtatatgttggggtgggatgggtggatggaattatgggtgtgttgggaagagtttaggttttggagttggatgttttgttgggaatttgggtgaggttagatggtattttggttagaagagagggttgtattttttgtaggtgagttttagaattttagggtggaggatgagtgaatgggggattaagggaggaattttagtagtttttaggtagtattttgggtaggtggtaggaatgggggtgttagtgggtaggatatggaatttattgtagggaatgggggagatttgaggaggagagttggggatgaagggagaaaattatttggttagagttgattttgggggttgtggtagttagattgtaggtttgtggttagtggggtgagatttaaaagaggagtagtgaggaaaaggggtatttttttgattgttagagttggagaagattaagatttgtgttaaatagagttatttagagttttgttgtttttatattttataggaaattttgtaaaaaaaaaaaaattaataattttttattagaatgtaagagaatgataaagtaggtttttattttaggtttttatttaaaggaaggatgaatgaagagagagtggaaagatttatagagtttttagtatgttttttttttgtaagatttttttatttatttatttagtaatagatatttattgagtatttattatatagattagttttaggttttggggaaagttggaattaaaatagataaagttttttgtggttttttatgttttttagagggtattgtttttatagatgttttttagttttattttattttgattagaggtttttttatgtttttgaaatttttggaaatttatgtagttattttttatattagttatgaggttttatgttatgtttgggatattgtttttatttggtataggtgaggaagttgtgtttaaggttatagagttaggtgtagaattttaatttgataggtgttgaaatttatttttgatattatttgttttttgtatttttggttgtgaagttgagaagaatgttttgggggttatggtttttttttttttttttttttttgtgagatggattttgttttgttatttaggttggagtgtagtggtaggattttggtttattgtaagttttgttttttgggtttatattatttttttgttttagttttttaagtagttgggattataggtgtttgttattatgtttggttaattttttgtatttttggtagagatagggttttattgtgttagttaggatggttttaattttttgattttgtgatttgtttgtttaggttttttaaaatgttgggattatgggtatgagttattgtattgtgttttgggggttatgtttgtaagattttgttttttatttttatattatttgggatggaattagggttattttaagtttaattaggattattttagaataggatgttttttaggttttttggagtttttggttagtaagatttgattttttttttttggttgttttattgtggatgagttatttattttttatgaattttagtttttatttatgaaatggggatgataatagtattaattttataggattgtgatggtgattaagtgaaattatgtataagtagtattggtgtattgtttggtgtataggtagggatgtttagttgttttgggttgttttatggttttgtagtagtagttaattttaagttttttttgttttaaaatttattattgtttttgttttgtagatgggaaaatttaggttaggagttaggtttggtattttagatttttaatttttggtagattggattagtttttttttttttttggtataatgaatggggaagagtgtggggttttgaggtattttgaggattttggagggttaatttattttttttggtgaatattatagaattttaaggtttttgaaattattgagttttatgaagaaggtttagagatggggaggttgaggttataataggggagttatgtagtagagttatgtgtatgtttgttttttttatttgaaagtgagttttttttttgaagttagaggttatggagttggagttgttttatttttatgttgggatgtgagttaggtgtgaatggatttttgtggttatatagagatattggggaggtttatatatttaggaggattttaaattttatatatatattttaaaatttgattagaattttattattattatttgtaatattttagtatttttaaagggtatagtgtgaggggtggggtagagaatttggtggtgtaggatgtatggggtagatatattatttttttttattattatattttttttatattttttttttaggtgggatagggttaaagtgttatttaatatagggagaaatggagtggtattagagaagtaagggggttgttatatatgattatttttatagaaaaattaagagaaagtatggagggagaaaaggagaaagttaagagagaagaagttttaggatttttagttattagagaaaatttattggtttggataaattttaattttttttaatttttttgtattttttttttaagtggtttttagtaagttattaaattttggtggtgtttgtatgttttagggtaagttagtttgattttttttttagagtttgagttagggttttttttattttagggtttattttattgaattggaattttaaggttatttgtttgtttttgtttttggatttgaaggtaggggttgtatttagagttttttagaatattttataaggtttggtatagtgataggtaaagtttggtgagttttgtgtaaatggaattaagttttttagttttttttgtttgtgaaataagatatgtgggttaggagatgattgttattttttttaattttgagtgagattttttaatatgttattatgatttattgtgtgtgtgttgtagggttaggggaggtattagtttttttgatgtaattaaaggtttttagggtttggtggatagttttatatagtgggaggagttggttatttggttttagttgattttggtttgtggtttttaagaatttaggaaaagaaaatttagtttggggagttgggtagagagtaggagttttagtttggtggggttgtattagagttaggtttttgtaattttattagggattttatgggtgtttttttgttgttttttaatgtttaggagtttatggtggggtttgttttatttttaaggagattgaggtagaattgtaagtatttgttttatttgatgtatagagagagtgtaatttattggatttattgtaggagttgtatttaataagagagtgggtgagtggattggattttttaatattttttgtttttttatttattgtagtggaaggaggagaatttggtgggtttttgtttttttattaatttggttgtgggggtttatttttttttgggttttagtttgtttatgtgttaaatggggttagtagtgggtatagatagtgttaaggatatgttttttttgtagtgagttatatgggatagagggtatattttagagttggtggtttgttagatggttttgttgtagtgtgggtgggttggatggattatgtttgagggttttaggatgatgtggggggtggttgggttttattggggatttgttatagggagattttgtttgttatttggtgagttagttgtttttgggagttatgattaggggtaggaaggttataggttatgatgtaagggtgtttagttattttttttgggggtgtttttggaggtagaggttatgttatttatagatttagagaagttttagagttgtgtatatgggtatttatttttgtatatttgaggtttgtatattgggggatatagatataagtgttagaggatagatatgttttttattggattatatataaatttttggttttgttttgaaatatttagatagtaggatgtggatttagagagaatgggtatggtatatattgtttatatttatgttgtgtatatgtttatataaatatttaagttggtttttgggtgtatttaattatgtgggggtaatattgtaggagatattagttttttatttatttttttagttagtgaatatttgttaagtttaattgtataaaatatttggaaggatataagttgtaatataggaggtagggatttggtatgttttattttttaggagaaggtttgtttagggaaggtgttttataaatattgggatagggaagatgagtggatataggggttatgagtttggggttttagtttgagtttggttataaagatatttgtttattttttttttatttgtattttagttttgagtttagaatttgtattttattatggttttgtaggatttttagttggttttgtgttttgtgatggttttttatttaggatttgtgttagtttttagggaagttttttttatttattttattttagttttttttggataaaaatgtgtgtgggggtgaggagggaagataaagggggtgaaggtgggtttagattgttattagtatagaaattttaagagggtttttggaaattgttaatatttttgtattttatatagttaaaatttagattttggagtagaatatatttttttaaggttatggaggagtagagaatgtaaaggtggaggttggggtgatttatattgtaattgtgggttttggtttttatgtgtgttgtgttggatattagtgttatggtttaaattttttatagttttttagttttttttgttgtggtttttagagttttggagagttagttgttttgttttgatttgggttattaggttttgtttttttatgaggtgtgtggggttaatatttatgttgggtttttagtttagaatgaaaatttatttttaaagaatttgttttaagaatttgatgaagtaagtattggttttttttttgtttttaatgtgtagtggtgttagtgtttagtagttttgattaagtggttttgagtataagtggtgtttttattgggaaagataggtatttggtagttggtggttttttttattttgtttgtattttttagtgattttttttttattaaaatggtattttgggagttgtggagtgttatggtgatttttttaattgtttttggagtttaaatttgaattggtttgtggttttgagtattattttatatattttagttttggttttttagagttttgtttttgtgtggtttttttttgttgttgagttataatttttttttatttttttttttttttggtgttggttggtgtgggttggggttaggtggagaagttgttttttgttaaggtgatagaatgtgttgggggtgggggttggggttagggttggtgtaattagggggttgttgtttttttttggatatagtggaagttttttttgtattattaaatttttgttattttttttgagggatttgtttttaggtagtatgtaagttgttgttttgggtttattttgtatttttttattgggtgaggaaggagtattttgaatggagatgggggtgtttttggtttatatatttgtagagaagaggtgtgttgggttgtatttttggaggttgtggtaattgatattagagaagattttggttgtagttgggaaggtttattggttggaaagaggtgttttttttttttagtaaagggttttgtttggaagggttgttttttatttgtttagtggtattataggatggttggtttttatttgaatttttttggatggtattattatatagttgggtttttgtagtgttggttttttaatttgatgattgttattttggtgaggatttgtgttgatggttggagaattttgtgttgtgggtgtatatggttaggtggtgtttggtaggtgatgtttgggtgtaggatggtgtttttattgttttattttaaattgttgtttgggtttaggttttttggttttttgaataggggtttggggggttaaggatgttgaggttttgggggtaggaagttttttttggttaagtgtttttttttttttttggtatatatttttttatttatttattttgtttatttttggggtgagaggtttattaaggtagggtgtgttttttttatgaattattttaaggtttttgagttgtgggggttttgggtaattatttttttttttttttggttttaggtattttagtttaggggtttgtagagaagtttgaagtttggataaatgtgttggatgttaataattttttatttttggtagtagtaaaggttaatatatttttattttttattttagtttgttattaaaataaagttgtgtgtggttgagggtaggaaggtgttgagattgagaagaagggatgttttggagaaagtgtgtttagttgattttagaaattagagttttttgggattttgttgagattttttgtagggtgttttaatttgtttttttattgtgtgttggtgttgtagtgtgtgtggtttagggtttggtgattttggtttagtttggtggttgtggtgaggtttttggtgtagttgtttggaattttgtattagaattgggattgtgtaaatgttttggttgaagtgttattttatttaagaaatattgttgttaggaataaaatggggtttttggtgttttgaagtattttttgaaatttttttaaaataatttataaaaaatgtttttgttttaatgttttataatgtttaaggaaatatgtaaatggtttgtttttttattgagatggttgttttaattaatagtgtatatatatataataatttttttaatttttttttttagagttaagtattttattatatgtaaattataataaagaaaagattgtgtaagattatgtaagttgattgatttaaaatattgagttttaatttaggttttttgtttttttatttaataatttttgtgtttggattagattggtgaagtaggttatggaaattaataaagtaaaaaattaaaagtatttttttttgttatttttttttttaaaattaaataatagttgtttttttttgagtaggttttagttttaggtttgagtttttttgtgattattttatagttatttatagtagttgttgttgtttttgttgggtttttgtttttgttttttttgggttgttttttgtatataaaatatattttagttttttaattaaatttaaatatgattttggtagaatttatatattttgtggtgtatggattgtgttggtgtaggggaaataaatattttttggtatttaattattgagtttaatttgaaaaattgggattgggtttttaggtggtattttaggggttttaatttggtttgtgtttttttagattttggtgttgagagtgttgtttttgtgggtgggtggatggagaggtaataatttgtttttaataaaaatttgttgttattgaattgaaagtgaaagggaagggagaagaggggtagttttttgtagtggttttgtgttttgggataggtagattaggattagtatgtgttggttgtagttttggtggttggatttggagtttgggggtgaggtgttggagtttttgttttgagtatagggaggttttttgtgttgttgagaaatgttggatttttaatttgatatgttttttgtggtttaggtggtttgttttggatttgggtaaggaatttaggaggttaaagagtggatttagagtttggaggggagaatggtgaagttttgggttgtaatagaagagggtttggtgggggtttttttgtaaaaatgtggtttttgtatttaaaggatattgtggagttgttttaattgttgtttttttagtatatttggggaaaggaaggtttaagttggggtagggatgtttgtagtttgggagggttttttttattaattttttttgtaatttggtttagatttggttagtagagattggaggtggtttttttgttttgtatttttttggtttggtttaggtttagttgtttggggtattttttttgttgagaggtaattggattttgttgggagtgggtttagaagttgaggtttaggaagaggtttttgagttttttttttttgttaggtgtagttatatatgtgaaagaatagtttttgttttgatttttagggttaggaatggttgttaggttttagttgtttgtttgaagatggagattagttagtgttagtattggtattaaggttgtttttgtttttgatttttttaatgtttttgggagtgtttaaggatttttttttgaattttatttttttgtttttgagtatatatatttttataattgtgggagagaattgttgttaatgtatgttttagtttttttgtttgttggtagggtagggattttattttagagtttttttttttggttatttttgttaagggtagagttttattttttgtatttttagtttttttattttagatttaatgtgtttaattttttttttagaaggattagatattttttggttggggagatttagttgttgagagagggaaagaataaatattgatttgttgtttattgtttgtggttttgttttgagtagtgtttttattttaggtagtatggagtggtgttttgttggtagttataggttgtttttggttttagtttgtagtttatgatttagagtagtggtagggatttgttttgtttttagaattgggtgtttttgagtttttagtggtttggagatagatagggatggaaatgtgggtgggggttgggaggggtaggggtagtgggggtttttgtttttgttttttgttgtttttgtagaggtatatttatgatttagtaaggtttttttgttattattttaggatgtagatgaggaaattggggtttgggaaggtgtttgttgttaggttatattgttatgggttaggggtagtagtgggttaagtggttggttttttttgttagttttaaaggttagtgtaagtagaggaagggttaggttggttgtgggggtttagtaggatatagagagagggtttaggggaggttaggtttttttgttttttttttggatttgaaggtatttaattaagaggtggggagttttttaggttttttttttgtttaatgtattagtttttttagaggttttattggtaatttttattaaaatatgaaaatttaatgtagtggagagagagtatgagttttttggttatgtaggatgaatttttatgggttttttagtttgtgatttgtttttatttaatagttttgaatgatagggatgagttggggtttgtatttttgggttgggaaggatagttagtatggatagggttgagagtttttgttggtttagtatggaaagagtgtttgtatgagagttgtgtgtgtttatgtgtggagttgtgtgtgtttgtgtgtggagttgtgtgtgtttatgtgtggagttgtgtgtgtttgtgtgtggagttgtgggtgtttgtgtgtggagttgtgggtgtttgtgtgtggagtagtgggtgtttgtgtgtggaattgtgtgtgtttgtatgtggagttgtgggtgtttgtgtgtggagttttgggggtttgtgatttgaatgtttgattttattttaattggaggtgaagaggaaggtggaggaagtggggaagggttattgaatttttttaaatttttttttagttttgttttatgggtttgggagtatgtggtttatttgaggttatatgggtatgtgtttttggggtatgattatattggtttttaaagaagatgttttttgtgtgtgtgtgtgtagagtgtaattgtagataagtatatgattgtgaatgtttgttagtagttatttatgaattagttttgtgtttgtgaaagaaggaatttgaatatgagaaaatatttgttattggttgtttttttaaagttattttagttattaaggtttttgttgtgttttagtttttgtttttaggtttagtgtttttttattagtttggattagggtaaattttttgtttttaattttttttattagggttggatttgaaggttaaggtttttgggtatgtgtttaggatttttggtttagagaaggtttttttttttttgtgtttttgtttttttttttgttttggggtttaggaattttgattttttggaagaagagaaggtttaggttattgagttgttttggttagagatgtttttgagtgttttttttttttgggtaatggtggttgtgttttggggggtttaggtttgttttttgtggttgtgtttaaggtagtttggaggttatttaggttagtttttttgggttttttgtgggtttaaattaggatttagattttttttttttgttatagttttgggttatttgggatttgggattttttgtttttttttttattttgttttaaattattgtttagaggtttgttgtttttaagaattgttgagggagaagttttaggggaattggtttgtttgtatttttattgttagtagtgtttagggttttaggatttgggttttgttagattatagtgttttttgggattttagggtttttggttttgtattgtgttgtgttagtgtgtttggattttttgtgagtttttggttaattatgttttgggttttttgtttggttttgtatttgtggtgtttttatttgtggtggtgttgtttgaggagttttttagttggtgaggagtgaggtttttgtagttttgttgttttgtagttttgtagttttgtagttttgtagttttgtagttttgtagttttgtagttttgtagttttgtagtttagtgttagagtgttgtgtggagattttttgttgttgtatgttttgggttggtaagaagtatttgttttaaattttgtttagtgggtagtgtaaagtgagtggtttggggaaatgttgaagggattgggaaaaataaattttaagttgagtttaatagttgaaatgttttgtgtttaggttggtggataagaaggagatagaatagattttttggtttttttgtagtgattgattttgtttattgattagagttattattttgtttttagtttgttaatttatattttttgtaagttattagttttaagggatgtggaagttaagtattttgtggtttttagtattaggtgatttgtatgtgtatttattgtagtagggaatttgtaaggttgtgttgtggttgttgttgtttttttggagtttgaggttgttgtttgggggtgttttgtaggtgttttgttgtaagtaaagatgtggttgtgtgggtggttggggttgtggttgttgttgttgtggttgtggttgtggtggtggttggggttgtggggttgatggttggggttggaatttgttaaaggagttttgtgttttagttttattttttaggggtgttgttaggttttgttgtttagtgttgtaatgggtttggtttttggtgtttttgaatttttgtgttttggtggtggttgataggaaagttgtgttgaatttgttgtttttgggaaatgttttaaaaggtgatgagtttttttgattttgtgatattgggttgtagtaggtgtttatggtagtggttggtgatttgtagtaagagatgtaagttttagtatttatgtttggtttgtgtaggtggtgggtggggatgtgagtgagggtgtgaggatgttattgtgtgttttggttgggagtttggggaggtgaggaggttgtggttgtgtattttttgtttggtttgtttgttttttttttttttttttatgttggttttttttttttttttttttttttttttttgttttttttttttttttttttttttttttttttttttttttttttttttttttttttttttttttttttttttttttttttttttttttttatagttagttgagggaaagaatggagggtagtaaaaagatttagatgttttggaaagttgattagattttttaaatttttttaaggttttgtagtggaaaaaaaaaataagtaaatttttttttttgttttgttttttttttttttttttttttgttttttttttttttttttttttattggtttttgtttttttttttttatttttaaggagatgttattaatttgttagtggggatttaatttggaggtgtttgagggtttttttgattttaggtggggttggggagatgttaggatttttagggtttttgaggttaggttgagaattggtggggtgttggagttttgttttagggtaaagggaaatgtaaattttaatgataggttaaaaaaaagttttttaaaataaatttaataggttttgatatttgaagttagggggattatgggtttgtggatgtaagtgagttttatggatttttgtgtgtgagtttgtgggtgttgttgtgggtttttttgttggtatttttttttaggtttttaatttttttttttatttttgtttttatgggagattaatatatatataagtttttgttgtttagtgtatggttatttgtatgttttgttaattatttttttttgttgtaagggtgttgggttgggatgtagtggaatttgtgtttttttaagttttggagaagttttgggttgggtttggttttagaagttttagagtgttgttttttgtgtttttgtttagaggttgtattgtttatgttttatgtttgtgtttaggtgaggggattttttgttaggtgaagtatagagagtggattttggagattttttgattttgtttgatagttgtgttgttatttgtttattttttggggttaggggttggggagaggggtgagattgttttttttttttttggttttattgtttttgattgtaaaatgaattgtttggttttgataggttgtggttttattattattgtgagttttaaggtttttggtattgttatagtaagggaaaaaattttgtgtgtgtagttttttgattttgttttatgataattgtgttagagattggtgtttttaattttttgatgagttaatggaggtttagagaggggtggttatttggtttaggttatatagttgggaaatagttgttgtgttttggaatttttgtttaggttagtttttttattgatttggaaggttgtgtggatagtgtagatgtagaggggaaattggtttttggttgtggaatggtttaagttgaaggagattagtgagagtagttttttttaaattgttgagaaaattgttaagtgagaatgtatttttagggagtttgggagtagggtgagaggtaaaagtgtaaggtaaaattaaagagggtttgagtattgtgaattaaggaatgtgggttagatgttaattttttgtatttaaggttttttaaagaaaaaatatatttggggggttgtgtttttgtttttaattttatttgggttaatttttatttttattttatttttttagtatttttggtttttgttttgttgttgattgtgtgattttatatttggtttttattgttggtttattttgaagtgtttgttaataaagatattttgtaaattaagttaggagtgtgtaggttttagttgttttttattttatgtttaatgggaattgtgttttattggtttgtagatttaagttatttgagagttttttatttattgagtttttgttgtgttaataatttggtaatataaggtttattatatttattttgtatatgggtagattgagatttaattaaaataattttttagttagtaaaaagtggagtgtttttgttattattttaaatgtttttgtttagtggtttttttaagtttttagaatttgttaaggtttttagtttgtgtattgtagtataggtggttttttttatttggaattttttaaatttatttttgtatttttgtttggttaatgatttagagtttagtttagagtatttttttttaggaagattttttgttttttttagtttaagttgatgtttttgtttgttttatttttgttttagattttgtggttgtttggttgtttggttatgagtgtattttaattttattagttgttttagggtagttttttatgtgtttggtattttataaatatttgtggaataaaagattaaatttggattaggtgtggtggtttatatttgtaattttagtattttaggaggttaaggaggatggattataaggttaggagattgatattattttggttaatatggtgaaattttgtttttattaaaaatataaaaattagttagatgtgatggtagatgtatgtagttttagttatttgggaggttgaggtaggagaatggtgtgaattagggaggtagagtttgtagtgagttgagtttgtgttattgtattttagtatgggtgatagggtgatagggtgagattttgttttaaaaaaaaaaataaataaataaaaataaaataaaataaagattaaatttggggttgtaggattttattattttagtgtattttaattgtttagtgtagtattaagttttgagattttttttttggttttttttagttaaggatagttggttatttatttattttttttttaaaaattaagtagtggaattaatagtgtgttggattttt

SEQ ID NO: 8 - DNA, 52626 bp, Artificial Sequence
  chemically treated genomic DNA (Homo sapiens)
gaaggtttagtatgttgttaattttgttatttgatttttgaagagggggtgggtgggtgattagttgtttttgattaagggaaattaaagaaagagttttagaatttggtgttgtattgagtagttggaatatattgaggtgatagagttttatagttttaggtttaatttttattttattttatttttatttatttatttttttttttgagatggagttttattttgttgttttgttgtttatgttggagtgtagtggtataaatttggtttattgtaagttttgtttttttggtttatgttatttttttgttttagttttttaagtagttgggattatatgtgtttgttattatgtttggttaatttttgtatttttagtagagatagggttttattgtgttagttaggatggtgttgattttttgattttgtgatttattttttttggttttttaaagtgttgggattataggtgtgagttattgtgtttggtttaggtttaattttttattttataaatatttgtggggtgttaggtatgtaggaggttgttttggggtaattagtggggttgagatatatttatagttaggtaattagataattatgagatttgggatggagatgaggtaaatggaagtgttaatttaaattaggagagatgggaagtttttttagaggaagatgttttaggttgaattttgaattattagttagataaaagtgtaggaatgagtttagggaattttaggtaggggaaattatttatgttatagtgtataggttagagattttggtaggttttaggaatttgaagaaattgttggataggagtatttaggatgatggtaggagtattttgttttttgttaattggaaaattattttggttgagttttagtttatttatatgtaaaatgggtatgataagttttgtattgttagattgttggtataataggagtttaataaataaaggatttttaagtggtttaggtttgtgggttagtgaggtgtggtttttattgggtatggagtggggggtggttggagtttgtgtgtttttggtttggtttgtggaatatttttattaatgagtattttaaggtaagttggtgatggaaattagatgtgggattgtgtggttggtggtggagtaaggattagagatattaagggggtagggtgggggtaagaattagtttagatgagattgggagtagaagtgtgattttttaggtatattttttttttgggagattttagatgtagaaagttgatatttgatttatattttttggtttatggtgtttaggttttttttaattttattttgtatttttattttttattttatttttagattttttagaggtatgtttttgtttaatgatttttttagtggtttaaggaaggttgtttttgttggttttttttaatttgaattattttatagttgggggttagttttttttttgtatttatgttgtttgtatggttttttaggttggtggagggattagtttgagtagaggttttagggtgtgatggttattttttagttgtgtgatttggattaggtggttgtttttttttgagtttttgttagtttattagaaaattgggggtgttaatttttagtatggttgttatgaagtgaaattgaggggttgtatgtgtaaagtttttttttttgttgtggtggtgttaggggttttgaggtttgtagtggtggtgaaattataatttattaaaattaagtagtttgttttatagttgggggtagtgaggttagaaagggaagagatggttttatttttttttttgatttttgattttaaggagtgaataggtgatagtgtgattattgggtaaggttagggggtttttagagtttgttttttgtattttgtttggtaggaaatttttttgtttgggtgtagatgtggggtgtgaatggtgtggtttttagatgggagtgtagagggtagtgttttaaagtttttgaagttgggtttagtttagggtttttttagggtttgagggagtatagattttgttatattttagtttagtgtttttatagtagagggaaatagttaataagatgtgtaagtgattatgtattggatgatgaaggtttgtgtgtgtgttaattttttgtaggaatgggaatggggaggaaggttggaaatttaggaaaaggtgttagtgggaaggtttgtagtggtgtttgtgagtttgtgtgtaggagtttgtaggatttgtttgtatttgtaggtttgtggtttttttggttttgaatgttaaaatttgttaggtttattttggggggtttttttttaatttgttattaaaatttgtatttttttttgttttaaggtaaagttttgatattttgttaatttttagtttagttttgggagttttggggattttggtatttttttagttttgtttagaattggaaaagtttttgggtgtttttgggttgaatttttgttagtgagttagtagtatttttttaagagtggagaggagggggtaggggttagtggaaggagagaggaggaggggatgagagagggggaaaggaagaagtaaggtagggaaaaaaatttatttattttttttttttgttgtaaaattttaagagggtttgggagatttggttaattttttgaaatatttgaatttttttattgttttttgtttttttttttggttagttgtggggagggaggaaagagagagagggagagagagaggaagggggggggagggaggggaagagagagagaggagggagagagaggagagagatagagaaagaagagggggagagagagagaggttggtgtggaggggaggagggagagtgagtaggttgggtaaggagtgtatagttatagtttttttgtttttttaaatttttagttaaggtgtgtggtggtgtttttgtgtttttgtttgtgtttttgtttgttgtttgtgtaagttaggtatgaatgttgagatttgtgttttttattgtgagttgttggttgttgttatggatgtttattatagtttggtgttgtagagttgggagggtttgttgttttttagggtattttttggaggtgataagtttggtataatttttttgttggttgttgttaaagtatagggatttggggatgttaagagttgggtttgttatggtgttgggtagtaggatttggtgatatttttggagagtggagttggggtgtggggtttttttaataagttttagttttagttgttgattttgtagttttagttgttgttgtagttgtagttgtagtagtagtagttgtagttttagttgtttgtgtaattgtatttttatttgtagtgaggtgtttgtaagatgtttttggatggtagttttaaattttaggaaggtagtagtggttatagtgtggttttgtaggttttttgttatggtgagtgtatgtgtgggttatttggtgttggggattatggggtgtttggtttttgtattttttgaaattggtggtttgtgggaggtatgagttggtgggttgggggtggggtggtgattttggttggtaaatgggattgattgttgtgagggagttaagggatttgttttgttttttttttgtttgttggtttaggtatggagtgttttggttgttaaatttgatttggagtttgttttttttggtttttttggtatttttttaaattgtttgttttgtgttgtttgttgggtgggatttgaagtggatgttttttattggtttagggtgtgtggtggtaaggagtttttgtgtagtgttttggtgttgggttgtggggttgtggggttgtggggttgtggggttgtggggttgtgaggttgtggggttgtggggttgtgggatagtaggattgtagaagttttgttttttgttggttgggaggttttttgggtggtgttgttgtaggtgagagtgttgtaggtgtggagttaggtgggaagtttggagtgtggttggttgaaagtttatgggaaatttaggtgtattggtgtaatatagtgtggagttagagattttagggttttaggggatattgtggtttggtaagatttgagttttgggattttgagtgttattggtagtggggatgtgggtaggttagtttttttggagttttttttttggtgatttttggaggtggtaggtttttgaataatggtttaggatagagtaggaagggagataggaagttttgagttttaggtggtttagagttgtggtaagagagaagggtttgggttttgatttgagtttatggggaatttgggggagttggtttaaatgatttttaagttgttttgaatgtagttataggaggtaggtttgggttttttagagtatagttattattgtttgggagagagagatatttaaggatgtttttagttagagtagtttagtagtttaggttttttttttttttagagaattggggtttttgaattttaaagtggaaggggaagtaaagatgtagaaagggaaaaattttttttgggttaggagttttgagtatatatttggaggttttggtttttaggtttggttttggtgggaagagttgggggtagggaatttgttttgatttaggttgatggagaggtattaggtttggggatagaggttgggatatggtggaggttttggtggttagaataattttgggaaaatagttgatggtagatatttttttgtatttaggtttttttttttataggtgtagaattagtttatagatggttgttgataaatatttatagttatatgtttgtttataattgtattttatatatatatatgtagagagtattttttttaggagttgatgtggttatattttaagaatatatgtttatgtggttttgaatgagttatatatttttaaatttataggatagaattgagagaagatttagaaagatttagtggtttttttttattttttttatttttttttttatttttagttggaatgagattaggtatttagattatagatttttaaggttttatatatagatatttatagttttatatgtaggtatatatagttttatatatagatatttattgttttatatatagatatttatagttttatatatggatatttatagttttatatatggatatatatagttttatatatggatatatatagttttatatatagatatatatagttttgtatatggatatatatagtttttatataggtattttttttgtgttaagttagtagagatttttagttttgtttgtattggttgttttttttagtttagggatgtaggttttagtttgtttttgttatttaggattattaggtgagggtaggttgtagattaggggatttatggaggtttattttgtatagttagagagtttatgttttttttttattgtattgaatttttatattttaatgaaaattattagtgagatttttgaagaggttgatatattaggtaagaagagagtttaaggagttttttattttttggttaaatgtttttaggtttagagggaaggtggagaggtttggttttttttgagttttttttttgtgttttgttgggtttttatagttagtttggttttttttttatttgtattagtttttggagttgatggaaagggttagttatttgatttgttattgtttttaatttgtggtagtgtgatttgatagtaaatatttttttaaattttggtttttttatttgtattttggggtgataatagaaaggttttattgggttataaatgtgtttttgtagagatagtaagaggtaagagtaagagtttttgttatttttgttttttttaatttttatttatatttttatttttatttatttttgagttgttgggaatttgagagtatttaattttgaggatagggtaagtttttgttattgttttgggttataaattgtaggttgggattaaaggtagtttgtaattattggtaggatgttattttatgttgtttaagatggaggtattgtttggggtaaagttataaataataaatagtaagttagtgtttgtttttttttttttttagtagttgagtttttttagttaggagatgtttggtttttttaggaaagggattaggtgtgttaggtttaagatggagaaattgaggatataaaagatgaggttttgtttttaatagaagtagttaggaggagggattttggagtgggatttttattttgttagtaagtaggaaaattgaggtatgtattgataatgatttttttttatagttgtgagagtgtatatatttaaaagtggagaaatggagtttaaggaaaaatttttagatgtttttaggagtattgggaaagttggaggtaggggtggttttggtgttagtattggtgttggttgatttttgtttttaggtaggtagttgagatttggtaattatttttagttttggaggttggggtgaaagttgtttttttatgtgtgtaattatatttaataaaagggggaagtttggaggtttttttttgggttttaatttttgggtttatttttggtagagtttaattgttttttggtaaggaaggtgttttgggtagttgagtttgggttaagttgagggagtgtggggtggggaagttgtttttagtttttgttggttgggtttggattgggttgtggaaagagttggtgagagaaatttttttgggttgtaagtgtttttattttaatttgggtttttttttttttaaatgtgttaaaagaatgatgattaaggtggttttgtagtgttttttgggtgtggagattgtgtttttatgaaagagtttttattgagtttttttttgttgtaatttaagattttattatttttttttttagattttgggtttgttttttggttttttgaattttttgtttgagtttagggtgggttgtttgggttataggagatatgttgggttggagatttgatgttttttagtgatgtagagagtttttttgtatttagggtagggattttggtgttttgtttttaaattttggatttgattgttggagttgtagttggtgtgtattggttttagtttatttgttttgagatgtggggttgttgtgggaagttgttttttttttttttttttttttgtttttgatttggtggtgataggtttttgttgaaagtagattgttatttttttgtttatttatttgtaaaagtagtgtttttagtgttaaggtttggggaggtgtgggttaggttggagtttttggggtgttgtttaggggtttagttttgattttttgaattagatttagtggttaaatattagagggtatttattttttttgtattgatataatttatgtattatgaaatgtgtaaattttgttggggttgtatttgaatttagttagagaattggggtgtgttttgtatataagagatgatttaaagaaggtagaaatgaaaatttgatagaagtagtaatagttgttgtgggtgattgtggggtgattgtaggaaaatttgagtttgggattgaagtttgtttaggaaggggtgattgttgtttaattttggagggagggatggtgaaggaagatgtttttaattttttattttgttaatttttatagtttgttttattagtttggtttaaatataaaagttgttaaatagaaaaatagagggtttggattaaaatttaatattttaagttaattgatttgtatgattttgtataattttttttttattataatttatatatagtgaagtgtttagttttgaggaggaaagttggaagaattgttatgtatgtgtatattgttagttaggatgattattttgataaagaaatagattatttatatgtttttttaaatgttgtaaaatgttaaagtaaaaatattttttgtaagttgttttaagaaaattttagaagatattttggagtattggggattttattttgtttttgatagtagtgttttttgaatagggtgatattttagttagggtatttgtgtggttttgattttaatgtgaagttttaagtggttgtgttaggaattttgttgtgattgttgggttaagttggagttattaagttttgagttgtatgtgttgtgatgttggtatgtagtaggaaaatagattaaaatgttttatagaaaattttggtgaagttttggaggattttggtttttaagattagttgggtgtattttttttgggatgttttttttttttggttttagtgtttttttgtttttagttgtgtgtagttttgttttggtggtaaattgaaataagaaatggaaatatattggtttttgttgttgttagggatgagaggttgttgatgtttggtgtgtttgtttgggttttgggtttttttgtagatttttggattggggtgtttgaggttaggagaggagggggatagttgtttggagtttttgtggtttagaggttttgggatgatttatggggggggtgtgttttgttttggtgagttttttgttttgagggtaggtgaggtgggtgggtaggggagtgtatgttggagagaagagagaatgtttaattagagagaattttttgtttttggagttttagtgtttttagttttttaaatttttgtttaggaagttgaaggatttaggtttaggtaatggtttggggtggggtggtaagagtgttgttttgtatttggatgttgtttgttaggtgttatttggttatgtgtgtttgtagtgtagggttttttggttattagtataggtttttattgaggtgatagttattggattgggaaattaatattgtgaggatttggttatgtgatgatattgtttgggggaatttgagtggaagttgattgttttgtggtgttattagataggtgagaagtagtttttttaaatagggttttttgttggaaggaggaggtatttttttttagttagtgagtttttttagttgtaattggggttttttttaatattagttattgtggtttttagaggtgtagtttggtatattttttttttgtagatgtataaattggggatatttttatttttatttaagatgttttttttttatttagtagaggggtgtggagtaaatttgggataataatttgtgtgttgtttggaagtaggttttttagaaaggatgataaaaatttggtgatgtggaagaagtttttattgtgtttaggaaagggtagtggttttttagttgtattggttttggttttggtttttatttttagtatgttttgttattttaataaagagtggtttttttatttgattttaatttgtattagttagtgttgaggaaagagaggaatggaagggagttgtggtttagtggtgaggaagagttatgtagaggtaaggttttgaggagttaaggttggggtgtgtagggtggtatttagggttgtggattggtttggatttggattttagaggtagttggaagggttattgtggtgttttgtggtttttagggtgttgttttggtgaggagggggttattgggagatatgggtggggtaagaggggttattggttgttaagtatttattttttttggtgaaggtgttgtttgtatttgggattgtttggttaaggttgttgggtattggtgttgttgtatattgggggtagagagggagttagtgtttgttttattggatttttaaagtagattttttaagagtggatttttattttgaattggaggtttagtatggatgttggttttatgtattttgtagagggataggatttggtgatttaggttagagtagaataattggttttttagggttttgaaggttataatagagaaggttgggaagttgtgggaggtttggattatgatattgatgtttagtgtggtatatgtggggattggggtttatagttgtggtgtagattattttagtttttatttttgtattttttatttttttatggttttggagaagtatgttttgttttggggtttgaattttagttgtatgaaatgtaggagtgttgataatttttaaagatttttttggagtttttgtgttggtagtagtttgggtttatttttattttttttgttttttttttttatttttatatgtatttttgtttaggagaaattggggtaaggtgggtggaaaaggtttttttggaggttaatataggttttgagtggggagttattataggatataaagttggttagaggttttatagggttatggtggaatgtaggttttgggtttaggattgggatgtaaatagggagggggtaagtaagtgtttttgtgattaggtttaagttgaggttttgggtttatggtttttgtgtttatttattttttttattttagtatttatggagtattttttttgggtggatttttttttaggaggtagaatatgttaagtttttgttttttgtgttatggtttatgtttttttaagtgttttgtatagttgggtttaataaatgtttgttggttggaagaatgaatgaagaattggtgttttttgtagtgttgtttttatatggttaagtgtatttaggagttagtttaggtgtttgtgtgagtgtgtgtatagtatgaatgtgagtggtgtgtgttgtgtttattttttttgggtttatgttttgttatttgagtgttttagggtgaggttgagggtttgtgtgtagtttggtgaaaggtatgtttgttttttggtatttgtgtttgtgttttttagtgtgtgagttttaggtgtgtaagggtgagtatttgtgtgtatggttttggagtttttttgggtttgtgggtggtatagtttttgtttttagaggtgtttttagggagaatgattaagtgtttttgtattatggtttgtggtttttttgtttttggttatggtttttaggagtagttgatttattgagtggtaggtagaatttttttgtggtaagtttttggtggggtttaattattttttgtgttattttggggtttttgaatatggtttatttagtttatttatattgtggtgaggttgtttgataagttattagttttggaatatattttttgttttgtgtggtttattgtggaagagatgtgtttttggtattgtttgtgtttattgttgattttatttagtatatgagtaaattgaggtttaaggggaaatggatttttatagttaggttagtaggagggtaggaatttattgagtttttttttttttattataatgggtggaaaggtagaaagtgttggggaatttaatttatttatttgtttttttgttggatgtgatttttgtaataagtttagtaagttgtattttttttgtgtattaaatagggtagatgtttgtagttttgttttagtttttttagaagtaaagtagattttgttatgagtttttgggtattagaggatagtaggagagtatttgtggaatttttggtgggattgtagggatttgattttaatgtagttttattaggttgggatttttgttttttgtttagttttttaagttgggttttttttttttaagtttttgaaaattataagttagggttagttgaggttagatgattaattttttttattgtgtaggattgtttattaggttttgagggtttttggttatattgaggaaattggtattttttttgattttgtagtatatatataatgggttatggtgatatgttggggggttttatttaaggttggaagagatggtagttattttttggtttatatgttttattttatagataaaggggattgagaggtttgattttatttatgtaaggtttattaaattttgtttgttattatgttaagttttgtggggtattttgggaagttttggatgtagtttttgtttttaggtttagaggtagagatagataagtgattttgaaattttagtttagtgggatgggttttgagatggggaaagttttgatttaggttttgaggagaaggttaggttggtttgttttggggtgtgtaggtgttattagggtttggtagtttattggaagttatttaaggggagggtgtaggaaagttgggggaagttgggatttgtttaggttaatgagttttttttagtggttggaaattttgaggtttttttttttttgattttttttttttttttttttatgtttttttttggtttttttatggaaatagttatgtataatagtttttttatttttttagtgttattttatttttttttgtgttgaatggtattttggttttgttttatttgggaggggagtatgaggaggatgtgatgatggagagaggtagtgtgtttgttttgtatattttgtattattaggttttttgttttattttttatattatattttttgagggtgttaggatattgtaaatgatagtggtggggttttgattaggttttagagtgtgtatgtagagtttggggtttttttggatatgtgagtttttttgatgtttttatgtggttataaggatttatttatatttggtttatattttagtatggagatgggataattttagttttatggtttttgattttaaggagggagtttatttttaaatggggaagataaatatgtatatagttttattgtatggtttttttgttgtggttttagtttttttatttttgaattttttttatgggatttagtggttttagaggttttggggttttgtgatatttattaagaggggtgaattggttttttagaatttttaagatgttttaggattttatatttttttttatttattgtattaggaaagggggaaggttggtttagtttgttaaaggttaagagtttgggatgttaggtttggtttttggtttgagtttttttatttataggatagagataataatgggttttaaggtaaagaaggtttagagttggttgttgttgtagaattatgagatagtttagaataattgagtgtttttgtttgtgtgttaggtagtatattagtgttgtttatgtatgattttatttaattattattataattttatgagattggtattattattatttttattttgtggatgaaaattgaggtttatggaagataagtaatttgtttatagtgagatagttaggaaggaagagttgagttttgttggttgagggttttaagaaatttaaaaggtattttgttttagaatgattttgattagatttgagataattttaattttattttagatgatgtggagatgaaagatagggttttataaatatggtttttagggtatggtgtagtggtttatgtttgtaattttagtattttgggaggtttaggtgggtggattataaagttaggagattgagattattttggttaatatggtgaaattttgtttttattaaaaatataaaaaattagttgggtgtggtggtgggtgtttgtagttttagttatttgggagattgaggtaggagaatggtgtgaatttgggaggtggagtttgtagtgagttgagattttgttattgtattttagtttgggtgatagagtaagatttattttataaaaaaaaaaaaaaaaaaaaaaattatggtttttaaagtgttttttttagttttataattggggatgtagaagataagtagtgttaggagtaaattttggtatttgttaggttgaagttttatatttgattttgtgattttgggtatagtttttttatttgtattaggtgaaaatagtgttttaggtatggtatagggttttatagttggtatgaggaatgattgtatgagtttttagaagttttaggaatatgagagaatttttgattaaggtagggtggagttgaggagtatttgtgggaatagtgttttttaggaaatatgagagattgtaggaggttttgtttgttttgattttaattttttttagagtttggagttagtttatatagtagatgtttaataaatgtttgttgttgagtgaatgaatgaagggattttataggaggggaatatgttaggaattttgtaagtttttttattttttttttgtttattttttttttgaatggaggtttggggtgagagtttgttttgttgtttttttgtattttggtagaaaattattgatttttttttttttgtagggttttttgtggggtgtaggagtagtgaggttttgggtagttttatttagtataagttttggttttttttaattttagtagttggaggagtattttttttttttattgttttttttttgggttttattttattggttataggtttgtggtttgattgttatagtttttggggttggttttagttaaatggttttttttttttatttttaatttttttttttaggttttttttattttttatagtgagttttgtgttttgtttgttggtatttttatttttgttatttgtttagggtgttgtttgagagttgttgaggttttttttttagttttttatttatttattttttattttgggattttgagatttatttgtaagggatgtagtttttttttttggttaggatgttatttgattttatttgggtttttagtagggtatttggttttaaggtttgggttttttttagtatatttatgattttgtttatttgttttattttggtatatgtaatttgagggtatttgaatatttatggttttttgagttttattaaaggtttaggtggaggaattgaatttttattttatagatggaagttaaagtttaaagagggggaatagtttagaaggaatgtatggaggagtgtgtgtttggtaaaagtttttttttatatttaatagattttttagtttggtatttttgtgttaggtagggattagagtgtttggtagtgaatgaattggtttttgtttttagagagtttatagtttggttagaatgtgttatatgttatgggaatttttagggaaggtgaatggattggggttttttgagtatggatatttgaagtggattttgaaagttgaataggagtttattagttgaaggagatgaaagaggttttttagatttaggaaatagtataaattaagtttttgggtaagggaagaatatgaagtaagtgtgtggagtgtaggggtatgatgtatgttggtgaggtgggttgaggaatggtaggggtatagttgaagagagttttttattttattttattttattttattattttttgagataaggttttatttggttatttaggttggagtgtagtggtgtaattttagtttattgtaatttttgttttttaggtttaagtgatttttttattttagttttttaagtagttgggattataggtttgttattatgtttagttaatttttgtatttttagtagagatagggtttttttatgttgtttaggttggttttgaatttttagatttaagtgatttttttgttttagttttttaaattgttgggattataagtataagttattgtgtttggtttttgggttatttattttttattaaagggtttagattttggggaagttattggagggttttgagtaaaatagtgagattttaggttgagtgttttttgtatggtttagtatggtttttgttttttgtatttaaaatttttattttaattaagaatgaattttttattgtggtaaaatatatatagtataaaatgttattattttaatatttataagtgaattttttagtggtattaagtatatttataatattgtgtaattattattattgtttttagaatttttttattattttaaatagaaattttatatttattaaatgggaattgttattatatttttgattttttatttaagtgatttttattttattttttttttgtggatttttttattgtaggtattttttttttttttttttttttttgagatagagttttatttttgttgtttaggttggaatgaaatggtgtaattttagtttattgtaatttttattttttgggtttaagtgatttttttgttttagttttttaagtagttgggattataggtatttattattatatttgtttaatttttgtgtttttagtagagatggggttttgttatattggttaggttggttttgaatttttgattttaggtgatttatttgttttagttttttaaagtgttgggattataggtgtgagttattgtatttggttttaggtattttttataggtggaattatatagtatttttttttggtgtttggttatttgtgtattttttttggagaagtgtatttaagtattttgtttatttttgaatggggttgtttgtttttttgttttttagttataggaattttggatattaatttttttttagatatatgatttgtgaatatttttttttattttatggattgtttttttattttttggatattgttttttgatgtatagaagttttatattttgatgaagaagtataattttttaatttttttattttgttgtttgtgtttttggtgttatatttaagaaattgttaataattttagtgttaggaggatttttgtttatgtttttttttaagagttttatagtttagtttttaggtttaggtttttgatgattttaattttgaatatgatgtaatataaggttttttaattttatttttttttatggggatatttattttttttagtattatttgtagaaaagatggttttttttttattgattggttttgggatttttgttgaaaattaattgtgtatgtatttgagagtttatatttggtttttattttgttgtatttgtttatttggtttttgaatgattttttgatgtgaagtttaggattgtagaatgtataaggatttttgtaggttatttgtttatttttttgtttgtaggttagtgattaataggttatagaaatttagtttaaggatatatttgttttttgggatttggagttggtgagaaggggtggagggtagagttaaaggtgaggattttagagttatagttttggttttggttaggtttttggatatttgggggtttttttgtttttttagttgattattttatgaggatgtggtttttggggaaatttttttgtgttttgagggtttatatatttattttttgagatgtgtatatttgggattattttttttattaagatgattttagaatttttttagtggagtttggaggagttttaagaaggaagtatttagtggttttatgttgttggttttatgtatattttgaagattttttgttagatttttaaaagaggtatttgtaattttttgttttttattttaggttatttagtgaatggtataattaggggttggggttttagggattagatagtagagtttaaggggagtatagttgtagagaagtagttgtttttggtttttttttttaggaatttttttggtttaggtgattaaatagaggtttgtttgagtttggttttttagttatgtgttttaaggtataatttttagggtttttggaaaattatggaaattgtttattttataattgtgttatataggttgtttgatgttttagatgtttttggtttggagaagtttatgaagtttaggatttggaaatagattttagtttatatagttgagtgattttgggtaaattagttgatttttttgttttagtttttttatttgtaaagtggggataagaattatgtttatttgttagtgatagggtgaggtttaaataaggtaaaataggtaaggataaagttaggtgtggttgtttatatttgtaattttagtattttgggaggttgaggtaggtggattgtttgaggttaggagtttgagattagtttggttaatatagtgaaattttgtttttattaaaaatataaaaaattagttgggtgtggtggtgggtgtttgtaattttagttattagggaggttgaggtaggagaattatttgaatttaggaggtagaggttgtagtgagttgagattatattattgtattttagtttgggtaagaagagtgaaattttgtttttaaataaataaataaataaataaataaataaataaataggtaaggattttagaatagtttttggagtatagtaagtgtttagttaatgttagttgttatgattgataagattttgttggaattttgattttattagattggttggaaattttgataggtagttaaagttgattgggatgtatagagttggaaaatgaagaaattattattgaatttatgattattgtgtggttgatattgttttttaaaatatggatgagtgatgggaggggtgggggttgttatttttatttaatgtagtgggggtaggttttaaggagggataaaggttatttaggttttttaggttttttttttttataggttgttgtattttgtatatatgtgttatgagttggggaataattttttttttgttgaatgtgttttttgtgtttatttgatttagaattttagtttgtttttagggtaggggttttgttgtgtttttttttgattagtatagggttgagtatagagaattgggtttagggaatgttaggtaatttttgtattttttttgggttttagttttttgggttttatttgtaattaagaaagtatttggtgggtattgtttttggttatatttggattgagattttttgtggaaatttattgggagatattagtatttttaatttgaagatgaggaaggtgaggttgttttgttgtgaattgaatttagattttttgaagttaaagagtttttttttttttttgtttagggggtttatgtttattgtttggatgtttttatgtttatgtgtttattagatttgattagtatgtgagagttttgtagatggtggagggggtgtattgggaggggtttttagtatattgtatgttgtatgtgggttatattatttttgtttatttattgaaatgatgattatgttttttgattgtttagatattatttttttttttttttagagttattttgagaattaggttagtttagtttaggatttttatgtgatatgtgggagtagtttttgtgggtaaagaaggaggagataaatttttttaaatagaatgagtaatagtttttttattagtttagtgttggtgaagttaggggtaagaggttagtttggaaatattatttgtattatgtggtaggtggatagtgagggttaggtttttttagggaatgtatgtgtttaagttttgttgtattaatgtattttttaggatttagttttatgagagaagattttatagagtttagttttgtgttatataaagtatttttttaggagatttattttgttgtaggggatttattttgttaagaagtagtaataggtggaaaagagatgtatttgttttatgtttgttgtggattaaggtttgtttggtagaagggatatattatgtattatatatatatttttttttttttttttaagatggggttttgttatgttggttaggttggttttgaatttttgattttaggtgatttgtttattttagttttttaaagtgttgggattataagtgtgagatattgtatttggttatattatgtattttaaagaagagatttttttgaattttttattttgtttagatgagtagaagttaatgaaaaaattatttttttttttttttttttttttttttttttttttttttgtttgtttgttttttttttttttttttttttttttttttttttttttttttttttttttttttttttttttttttttttttttttagatagggttttattattatttaggttggaatttaatggttaaattatggtttattgtagttataattttttgggtttaagtagtttttttgttttagttttttgagtagttgggattataggtttgtgttattatgtttagttaatttaaaaattttttttatagagatgggggttttattgtgttgtttaggttggttttaaatttttgagtttaggtagtttgtttatgttggttttttaaagtgttgggattataggtatgagttattatgtggggttaaaagaattatttttaattaatatgttaattgtgaatgttgaaatattgattatttatattttatttttattatatgtgataggtaaaattttgggaatttatttattttaaattttagttatttatataaaaatattaattaaaatttttaggtataattattttttagatattttgaattgttaattattttatagttgtaaatgtggattttttaaaaagtaaatattgaagaattttttttatttttattaattttaaggaagttgatgatttttttaaagtataaattaggattgggtatggtggtttatgtttgtattttagtattttgggaggttgaggtgagataattgtttgaatttaggagtttgagattagtttgggtaatatagtgatattttgtttttataaaaaaaaaaaaaaaaaaaaaaatttaattagttagttgtgatgttgtgtgtttatagtattagttatttaggaggttgaggagggaggattgtttgagtttaggaggttgaggttgtagtgagttgtgattgtattattgtgttttagtttaggtaatagaaaaaaaaaaagtaattttataattaattgagttattatttttttttttttatttaaggggagaaaagttttgttgtttttttagtttgtaagtgattttttagattggaatgagtatatttgggttaggtgaggtggtttatatttgtaattttagtattttgggaggttgaggagggtggattttgaggttaggagtttaagattagtttggttaagatggtgaaattttatttttattaaaagtataaaaattagttaggtgtagtgattagtgttggtaattttagttatttgggaggttgaggtagaagaatggtttgaatttggggggtagaggttgtagttagttgagatggtattaatgtattttagtttgggtgatagagtgagattttgtttttataaataaatatataaataaaaattaaagaaggagtatatttgagaaagaaaagatttgatgttggtgaaagtagtatattttttttgggattatatgttgtttttgtaggttaagaaatttaattgtttggttaggtgtaatggtttatgtttgtaattttagtattttgggaggttgaggtgggtggattgtttgagtttatgagtttaagattagttgggataataagagtgaaattttgtttttattaaaatataaaaagttaggtgtggtggtatgtgtttgtagttttagttatatggaaggttgaggtaggagaattgtttgaatttagaaggtggaggttgtagtgagttgagattgtattattgtattttagtttgggtagtagagtaagattttgtttttaaaaaaagaaagaaagaaagaaagaaatttaattgtttaagattagtttaatttagtatgtatttgggtgttagatagtgataataggtagggtgagtgataatgttgttttgtaatattttttttttgtttttggtgagggtatagtttaaaggtagaggttgttgtgaatttattttttaaaagtttttttaagtttatataattaaataaatttaatatttgatttttatagtagttgttaatgttttattttatttatagtttttgttatatgtatgtgaaatgggttttttattgaaagggattttgggagttatttttgatagaggtttatggtttataaatgttattttgggagttgttgtttgggaaatttgaattggagaggatgtatttggggaaggaagtaggtgggggtgatatagttgtaggttgagtaatgttgttttggttgttagttgttatggttaaatttatttttagattataattgtgttaatatattatggtaatgttttattgatagagtgggtgttgtgtgtgggttaggggatatgttgttttgtattttattttagttagattttatagttattttgggatgtggatgtttttagttttattttatagatgaggaaattgaagtatataaaggttaagttatttttttaaggatatttttttgtggtagaattataaggtggtttgggagtttttttaataattttttttagttggtttttattttttttatggggaaaattggtattttttagttttatgtgaagtgttagttaaatatagttttaatagatttttttaataatattgttgttttaaaatattttttttatagagatttggagttgttttaaggttgggttaggtgtttttgttttggttattattttgtattgtaattatggtttttgttattgaggtgagttatttgaaggaagggattgtgttttattgggttttatatttttattatttggaattttgtttagtgtatagttggtgttttaggaatgttgttgaatgaattaatgtagtaaataagtggtagagttaggggttaagtttaggtttgttttattttaaagattttttaattattttattttgttttgtgtaggatttaagtttttttattttgttagtttttggatgaaagtgatattatagtgttttggtgaaggtggtggagttgtaggattttttttgttatagaagggaaatagaggtttgggggaattaagtgagagatgttttgggatatgtttagggttatatggtttagggggtttgagagggataatgggtagatagattatagggttggatgtaggaggtgtagggtttaagttttggtttttttattattaggtagtatgattttgttttgggtttttgtattttggttgtgaagggagggtttggtttagtggggtttttgaattttgtggatgtattgttgggataggggagagtatgggagattttgtttttttggtagtgggttttgttggggatagggttttatttaattatttatgttatgagatggagtttggggatgggatgaggagttgggaaatttttagtttttttgaggagagaagttgataggggtatttagagtttagattgaagttggaatatttattttattttaggaggtattaggaagtgatttttaagtgttagattatatatgggttttttatggagattttgaagtttggtttattttagttttttgagatagaaatgattttagtggtttagtaatgtttttttagaataaaatgaagtttgtttgatttttttatgttagaaagataatttattattattttgaaaggtagtggatttggtatgggattatttagtttgttttttttagttatgtgattttgagtaagttatttatttttattggattttagtttttttatttgtgaaatagagatattaatattgattttatgggatttggggagggttagaggagatagtgggtgggttagggtaatatgaatataaggtattatattattgttgttatggttgtaattagttttggttggagagtttttgtttaaggagtttggtaatttgggatttgttttatttggggtgaggggatggtattttggtattttgttttattataaaatgtaatatgttttgttgagttttttttgattggtaatatttaatttaagagttattttattgtagaggttttttttgatttttttaattaaaattgattgtttttttttgtgggttttgttgtgtttgggaaataagatttttgttttggggattttggaatatttgattgtgtttgttttttatgtattttttttattaggttatgatttttaagggaagttttgaatgaattagtaaggtaagatatagggtgggggagagaataggaaagataaattttagatataagttgggggatggaggggatttaggttttggtagaggggttatgggggttgagggttggataaagtttagggttttttttttttattattttttttttttatataaggaaattttatttatttggattaattgtaggatagttgaaattatagtagatttaaaaattaaagtattttttaaatttttaagttttaatagtagtttgattttggttttttatagtttttagaagagttgtttaaaggagttttatgttttaattgggttatagtggtttttatgggagtgagggtttttagagggttggggagtaatgtgtgtttttagagttggtatttgttttgtgatttttattgtaatgtataaggttttttgtagaattatgaatggtggtggtgatgaggggaaggtggggaggttgttaggtaaatttatttaggttttgtttaaatgattatatatgttagttttataagaggggtttttagggaaggtgttttttttttattagtttatatatttttttttttaaaaatttttttattttgatatagtattatatttaaagttataagtggattataaagaatttttagatgttttttatgttgattttttaaatggtgatgttttgttatatttgtattatttttaatttttttgggtttttttttgtgtttttttttgtgtatatgttttgtttatgtatgtattgatatatatgtatatgatatatagttgtattatttaatagtaagttgtaggttgggtgtagtggtttatgtttgtaattttagtattttgggaggttgaggaaggtggattatttgaggttaggagtttgagattagtttggttaatatagggaattatttgaatttgggaggtagaggttgtagttagttaagattgtgttattgtattttagtttgggtaatagagtaagattttgtttaaaaataaataaataaaaaaagagtaagttgtagatatatgatttatatgtttttttgtttttaagtattttagtgtgtgtaggttttgaaataaggtattggtttatatttgaggttttagatggttaatgaagttgatttttagtagagtagtttgattaggggtagttttgaaggttgttgtaagggggttaattttttgaggtagttgagagtagttatttttttgtgattttttttttttttttttgattttgttttttgtttgtttgttttagttttatttatagtatttattttaggagggtttagtaggtatgttttaggtatgagatttaagttttagttttgttttttattagttttttgttttttttttttttttttttttttttttttgagataggtttttgtttttgttatttaggttagatggaattttggggttaagtgatttttttattttggttttttaaaatgttgggattataggtatgaattattatttttggatttttttaatagttattgatttttagtaaggtatttattttttttggttttagtttttggggttataaaatggaaatttggtggttgtaaagaggttggaattttattggtggtataatagatgttttagtattttgtaaagtataaagtttagtttttggttttgtttagtttgtttgtttgttttttgtttttgtgagagtttagtattaatttttttttgtttttggattttgggaagtttattttatttttagattaagagaaaaatagttttttttatttatttttgttattgtaggaagaattgagagagtttttgtgtgagggtggagtagtggaggatggggtggtagattttgttttggtggatgtttgttttgggaagaatttatggggaagttggtaataagtttgttagttatatggaaagttgttgggttaaatgataggggtgttttagggagtttttgtaaggtaaaggtttttgtaagttagttagttttttgagtatttattgtgtgttattttttttggagggttaaggaatttttatgggtttttaaagggaggttatttaaggaatgaaaaagagtttaggttttagtttgtttgttatttagttattagtgatattggtgggtttttttttttggtgttttattttgattgtttgtttaatgaggatgttggggttatagtgtgggaattttgaggagattggaatgaggtaggaatgtgaaaatatttagaattaggggaggaaagatttttgtaaggaaggttagtgatttgttttatttatttttttgttttttgtagtgttggaatggtggtagatgtgtagtagggttgaattattgtttgagtggtaaatttttttagttaggatttgggtttttaaataaatgtttagaaattttattaggtattggggttttaggattattattttttgtttagtgattttattggaattgtagtgttttttggtggttagtatgtataattgtagttttgattttggtttgttgggagttgggttttggaatttgaatgtttagttttttgggtaagtagttagggttggggatttttttttagttttggttttttatagggttgtgtttttttattttttttttttatatttttttttggtaggaatttatgtaatgttgttgagttgagtaaatagaaggtaagaggtttgtttagggttagggagttgttggggttatttttggttttttttgttttgtgttgtggttggtttttttgattttttttattttgaaaggtttttttttttgattttatgtagtagttttttgatataagtagtgtgtgtaggggattaaggattttttgtgtttggagtttagttttagggtttggggtttttttttgtagatatattggttatttttagttgtgtttgtagagttgttttagttaaattagaggtagaaggagtttagaggagttttttttaatttaggtatatataggtatttgtattaattttaggggtgtgttttgagtttttatttatatgaggtttaggttttagtagtatatttgggaggtttattttgattagtttatagtttagggagggagtaggtttatgagttggtgttgtaaagtaggggatttagtgtttaagaggtaagggaggttttggaggaagaagggtggtttttggttgagttttgaaagtttaggagagggaatttatagtagaagaaaataaaaaataaaatgttttatagttaaaaaataaaaaaaaaaaaaggaaagataagattttatttttatttattgtgttggtaaagattttaaaaatattataatgattattattggttttgaagtgggaggggatattgtggtagttgaggatattatatgtttttggaagataatttggttgtgttttttagagatttttagatatgtggataattgaattttatatttttagtttttggagttttttttaagggaattgttatgtatgtattgagagatttaaattatagatttgttatgattttaaataagtagaaatttgtgagtttaatagaaaaggatggattaaataaaatagtgattgtttttgttatgtaattattaaggatggtgtggtagaagaatatagaatagtatggaaaggggtatggaatatggttagattttattaaaatgtttataggttgggtatggtggtttatgtttgtaattttagtattttgggaggtttaggaaggtagattatttgaggttaggagtttgagattagtttggttaatatggtgaaattttgtttttattaagagtataaaaattagttgggtgtggtgttgggtgtttgtaattttagttatttaggaggttgtggtaggagaatagtttgaattggggaggtggaggttgtattgagttaagagtgtattattgtattttagtttgggtgataatagtgagattttattttaaaaaaaaatataaaagtttataaagtaatgttttttttgtgtgtgtttgtgtgtgtgtgtgtatgtgtatgtgtgtgagtgatttttttttggtttgttttgatttttttttaattttttatatagaatatagattatatttgtaatgtgaaagaaaagttataaaagttatagagaaagttatttaggtgaaagtagtagttagttatagataggagaggtagagagatatgttaggtagaaggaagggtgtttgtaggagtgtggaagtttgaagatatttgtgtagtgtgttgtagagtggaagtaggtttttgaattttaagttagatggaaggttggtgtgtaagtttgtgagtttggtggggattagttttgtttttgggattttgaatgttatataagtttgatgtatagggttggtagatttagtaaaaagtaagtaagtaaataataaaattaggttatttagttaaatttgtatttgaataatgaataatttgtaggataaaagtattttttgtgttatatttgggatatatttatattgtttaaagtgttaattgtttatttaaaattttagtttaattgagtttttttaagtggtgtttgttttttgttttttataattttatagtatagagtttagtttgtttttagagtatgtattatttaggattttaattattgtttttagatattttaatttgtttttgggaaaataaatagaaaattaatttagattagttttgttttgttttttaaaaaaagaaaagaaataaaattaatttatagatttatattgttatttttggaaatttgtagtattttttgaggataaatgttttattttttttttttttttgattaaaatgagatttatttgatataaattgaatatttttgtatgtgttaaaatgttatttttttttagtattattttatttatttgtttattaaatgtttattgagtatttattgtatgttagttatgatattaggtgttatatagtagggtaaataaagtatatatgtttagatatattttttgttttatgggagggagagagagagagataataaataaggggaaaatagaagaataaataaatatttaatattggtgtggtggtttatgtttgtaattttagtattttgggagattaagatgggtggattatttgaggttaggagtttaagattagtttgggtaatatgaggaaattttgtttttattaaaaatataaaaatgagtggggtgtggtggtttatgtttgtagttttggttatttaggaggttgaggtttgataattgtttgaatttaggaggtgaggttgtagtgagttgagattgaattattgtattttagtttgggtggtaaagtgagattttgttttaaaaaaagaaataatgtgtagaataaagattattaggaaggattttttatttatggaaatattattttttatttaattaattttttattgttgaatattttgattattgttggtttttttatatattaaattatgatatgatgaatgttttttttagtgaatgtttattattatttattgagtaaatttttagaagtgagatttttgggtgaaggtatataaatttttaatttagtttttgttttatatatatgaatataattttgtattttttttttagttatattttttaaaatttgaaaataatatgttgtaaattttttttttttttttttgagatggagttttgtttttgttgtttaggttaaagtgtaatggtatgattttagtttagtgtaatttgtattttttgtgtttaagtgatttttttgttttatttttttaagtagttgggattataggtggttgttattatgtttgatgaatttttgtatttttagtagagatggggttttattgtgttggttaggttggttttaaatttttgattttaggtgatttattatttgtttttgttttttaaagtgttaagattataggtgtaagttattatgtttagttgtaaaaaattttttggtatatatttttatgagttttaatatatttatgtatagatttatgtatttattgttatagttaggatatagaatagttttattatattagtgtaagttttttgtaaataaattttttttttttttttatatttggtaattagtgatttgttgtttagagtttttgtagttttgttttttttagaatttatgtgttagttgagtgtagttgtattttatgtaaatttgagattggttttgtttatagattttaaggttattttttagatttatttatgttattgttaatagttttttttttttattgtggagttgatttatggtttggatagattatagtttgtgtttttatttttttgttaaaggatatttgggggtgtttttattttggggtgattttgaatagagttgttgtagatatttgtttatgggtttgggtttttttttttttaaaataagttattatttttgtagggtaaatatttaggagtgggattgttgggttatgaggttagtgttagtttaattagataagatattgtttaagtgtttgtattgtgatggatgggagttttgggtgttttatatattgttgtaatttggtattattaggttttatttttattgtgataggtatatagtggtattttattgtgtttttaatttgtatttttatagtgggtaatgaggttgagtatattttatgtttatttgttttttgtagatttttttgggtgaagtgtttgttagaatattttgtttattttttgttaaatattattattaattatattttatattttatttagattttattggttttttttaatgtttttttattgttttagtattttttttagaatatattgattatatttagtttttatggttttttggttttttttagtttggggtagttttttagattttttttattttgagagtattttagggtttgggttggtggttgtgggtgagtaggatggtttgtgttattggttagtttgaggattgttatttttattttattttttgttgaagattggtagttttttgagggttgggatattgtttgtttttgtaaatagttgtgttttgtgtatgtgtgttgaaatttaagtttagttattattatttttttggtattatttattgggattggagttaaattagggatatttaagttgagttttggatagattttagtgttagatgaggtggggtggggatgtgattaatggttaaattttaatttttgtttttatttttataggattgtttggatagtagtgggtttagttagtgtttttttaatagtatgaaagggttttatgttggtttgttttttttaaggagattatattggtgtgtgtattttgttatagggtgtgtggggttagtttatttgagaatagagtaagtggtatgttttttataaagtagatgtttggaggaaaaatagatgtaattaaaattatggaggataaaatgattgagattttttagtgttatatgtatgggtttgtgtatggttttatataggtttatattatttatgtttatatttatttatgtggatttgtatttatatataattgtttatggggatatatattttatttgtgtgtttgtgtttgattatataagtatgtatattttataaatttatttataagtaattatatatatgttttttatatttatttataatggtagatttgtgttataggtttttgggtgtatatttgtatatatagatgttattagtattttttttttaaaatggttttagaaggttattttttaaattatggttaaaaaaaaaaagaaagaaagaaaaaagaaaaattagttatttttggaaattttttaagggtttttttgttttaaaaaggtaaaattagattagagtgatgttattgggttgaattaggatagatgggtagaggttaagggaatgaagtaaggttttttattttatgtatttttttagttgaaatttaatagttaggggtttttagtattagaaatgatagtttttagtggtatgggggtttttttagggggagttttagtagaggttgaagggtttagtggtttttgattgagaatataattttgaattgaatgttttttattttattaaaagtagtttatggtaataatgttgatttaggattgtttgaagagtattggatattatgatggttatattgtgtgtataatattttttgtggagtaggtattgtttttagtgatgtaggtttattatttgattgatggttttaagtagttaggggtttatttttagattaagattgggaagttgtagattgggattatattgttttggattttatagttttagttttgggataaatttattatgggaggggtattagtatagagtttttttgggtttataaggagttgttttagggaggatgtgagaagtttaatttttggtgggtggtttggatttatgttgggtgttgttgttgtttagttttatgttagtatgaggtgttttaaggttttgaagaaggtttgtttagtatttaggtaaattgagagttttttggtggttttttttattttagtgtggtggtagggtgggtgtggagttagtttttggtagattttggattgggtttttggattttggttttaattttggagttgtttttatgaagtttgtttttgtttttttttttgttttttgttttttgtatggagatattgtttaaggtttgtttgggtttttttttttttttgttttttgtagtgatttttgttgtttgtgttgttagttttgaatggtggtatttgttattgtgtgtttttttttaatgtattttatttgattttttttttagtgggtaggaggatgaggtggttggtttatttatttgagagatattttttgtatatgttttatagaatattggtttattaaaggtgtatatagatatttggatagagtgagagtttagtgatgtttgttagttagaaattgtttatttattttttagtaattttttattgtatttttgttatttgatttattttgtgttgagttttaggttgagaagggataaatggtatgaggttttagtttttggggaattgatattttataggaggagttggatatttggggtttgatgagattatgagttagtaaatataggtagttagtggagagggtgagtagaggatggaaaatagttataatttgggagggttttttggaggagtattggattttggaggttagttggaaggaggaatatgttaggtaggggtttgagatggggatttgggggattaaggttagtggttttttttggttaggagtagttagtttgagttatgggatttttatttttagtagttgttttgttgaggagggtattttgtggggagttagatttgattagtatttaggtttttagttattatgttgatattttagttagtttggggttatttttttggagagtaatttgttggttttgtttagggtttagttttattttttatattatttttgttattttttgttttatataggttggagaaatttagggttatttgaggaatagtagtgggaattgtagaaggaagggagatttagaggggtggtagtagttttttaatgtttgtagggatagggttgttatggggaagggtgttggggggttagaattggaattagtgaattagatttataggagatagatatgggttgggtttaaagatgagtagttttgttgttttgggggtagtgagttttttgttattttagattggaattagtgttaggtggagatgttgtagggtggtgagaggtggatatagatagtttgagtttggggttttaggatttagattttgagagggttgtgtttgttattttgattagttgagtggagttgtagaattttagggaatttttttttgttgtttaaatgaggaatttagttttagaatttaaagtaagttgatttaagataggttagaaggtttgttttttttttttttgaggaattaggagtagtgtttttttgaattttttttatttttgatataggtatattttttttttttttttttttttttaggtttttagggatagttttggttgttggtgagtaagggaggagggatttttaattattttgttttttttatttgtaggtgagattttagagatgaaatgggttatttgaagttttgagaagagtgggggttgaggttagggtttttaatttttggtttggtggtttttgtatattttgtgttatttttatttttgtttgtttatttggttttagtgggtagttggaggtgggtaaaattggatttttatttgttattatgaagattggattttttgttattttttttgaaaggttaagagttggtttagtgttgagaggttgtttttaggttgtatttttatttttttatttttaagggttggttttgttttttataagatggatagagtaggatgttttggttatatgaggtttttgggttttttttgtttttatttttttttttgggaataaggtttaagattgtaggggagggagtagagggtaggttaggagttgagaggttgtgttttgtttggaattggggtatgtttttttttttttttggttttagtttttttttagttaaaattaggagtttaggttggtttatattaatttttagtttttgtaatatggagtttttattgttgtgtagggtggttttaatttttagtaagtgtttatggggttgtgagatggggtttggggattagagtttagggtttagtgtttattttttttagttttttatttggtttttaggaagttgtaaaatagggatggttatttttgtgaggttgggtggggtttttaaaaaaaaaaaaaaaaaatttaaaatataaaatgtatttgtttgttaggaagataaatatttttgttgaaagtttttggtttagttgttagttgtagtttgtagaatgttgttattgaagttatggttgtttgtatgtgtttgggtttatataggtgttatgtgtgatgttgttgggttggttgtgtatttttatggtgtttgtattgttagtggtttttaggagtagttttttgaagttgtttttaggtttattttgggtatttatttttatgttttttttttgatgttttggagagggaggtgagaatgttataggttaaatgttttttttagtttttttagtgtgtatagaaagttaggaatgagatgagtttgaagttttagtttttaggatttggatggagttagaagatttggattagaggtattattttgatatttaatgtttattgtttggatttatttttagaagaagaaattgtgggttagagtggttgatgtttatatttattatatgtgtttgttgtgatgattaaagtttgtgtatgtgaaaggttgtgttaaatgttttttaaatgttttattaattgtgtttgtttttttatttaataagttttttttttttaagttatagataaggaatatagtttttgaggagtttatatttatatttgtagatatttagttggttgtttttttttaggtatttgtgtatgttttgtatatgtttttgtgtttaagggtttgtatgtttggaggatttttttagggttggagttttttaatgtttatagggtttgtgggtttgtaagtttagattagaaatgtgaatattaataatggtaaaattatatagttagtatattagtttttttattttttatagttattttatgaggaagattttagaagtatttttatttttattttatagagggggaaattgaggtatatagtgggtaggtaagtttttttgagtatatagttggggagttatggttataggatttatggtggggttattaagagtttatgatttaaattaggggtttttagtttttaggttgtggattagtattgatttatggtttgttagtaattgggttgtatataggaggtgagtggtaggtgagtaagtattattgtaagttttggtttttgttagattagtggtgttattagatttttatagaggtgtgaattttattgtgaattatgtatgtgagggatttaggttgtgtgttttttaagagaatttgatgtttgatgatttgaggtggaatagttttatttttaaattatgttttattataattttttttatttatggaaaaaattattttttataaaattagtttttggtgttaaaaaggtagggattgttgttttaaattttttgttaggaggtgagtgtgtttgtttaggaagtttattaggttgtgtggtggtaaagtggttttttgttttatttttttattttagtttttatttttttttttttgatgtgtatgggttgatttgtttttgtagttttgagttaggaatgtgttggtgggtggggggtttatttgttagatgtagtggttgggagttgtgtttatgtatatttatttaggtttggggttagtgtgttggggatgaaggtgtttgggtagttttagtaaatagtgggtaggagttgtttgtaataggaaatgtggtttatgttttaattttatgtatttttaaggaagaaagattttttttttgaataataggtgagattagtgtgtagggttggggggtagggaaggaggtgttgattttttagtattggatttttggggtagagtttttatagtttttgttgaatttttggtgggattaggttaggaaaggaggggtatttttgtttgttttaattttgggttttttttattttaagttttattgggttagatatggttgttgaatgagttttttttttatttagggaggttatggtattggggttagaatttttgggttttagaaaagttttgatgtagggaatttttttagagagaggagtttagggttagtgaggtggggattaaaggttatagaggttagattggttgttttaggtttatataatattgttgttggaagggatttagtttaagatgatggtgaagaggtttagattggggaagagatttgtttaaggttatatagtaagttaatggtaagttagaattagaagttaagtttttggattttgtatttaatgagttttaagaggaaaaaggtagggggtggttatttgagtgttttattttttttttgatatttttttttttttgtttggtttaattattggtttttgattttgttttttttttttttagttaaagagagttttttgggtgagttagagttattttttgattttgatattgtggggatggatagtagttatttgagtgttaaggaggttggggtgaaggggttttaggattgggttagtttagatttttttagtttattggagaaggttgatttagagagtaataagggtaagaagtggtggaattggattatttttattagttattagttggaggagttggagaaggttttttagaagatttattatttagatgtgtatgtgtgggaatagttggttatgaggatagattttattgaggtttgtgtgtaggttagtgagggttatttgggagtgaggttggtaaagtagagtttgtttttgggtttttggttgtagttggggttttttgattgtttattaattatattatggtttttttttttttagtttattgagaatttgaaagtgggggtttttagtttgttttttatgtttttgttttaattagagtgattttgtttttattttttttaatattgggtttttgtattgtggtggggggttgtaaaggaaggagggtttttagtagaggggtaggaaggttgttgttggttgtttttgggttttatatagtgtaagagttttggtttttttatatagagaagggttatttgtttttgttttagaaggtttattttttagataggaaataggataaatatgaagataatgtttatagtattttagtgggtagaaatagagaatagtttagtttttttttttgtttagatggttgtatttttttttattttttaagttttaatttatattttttttgagaagtttttttgattattgtggttaaagtagtagtttttttattattagttaataattaaaatatttaatttagtataatatagtggaatttaatatttaatttaatttattgtaatttaatagaatataatttaatagaatttaatttaatataatataatatagtggaatttaatatatttaatttaatttagtgtaatttaatataatataatttaatagaatttaatttaatttagtataatataatggaattgaatatatttaatttaatttaatttattttaatataatataatttaatataatatattttaatggaatttaatttaatataatataatataatggaatttgatatatttaatttaatttagtgtaattgaatagaatttaatttaatttaatataatataatttaatagaatttaatttaatttaatataatataatggaatttaatatattaaatttaatgtagttttttttaatataatataatttaatataatatattttaatagaatttaatttaatataatataatataatggaatttgatatatttaatttatttaatataatttaatagaatttaatttaatttaatataatagaagtaaattagtttattttttgttatattgttttattttatttttttaaaaattttttaaattttttttgttttttttttagagatagggttttattttattatttaggttggagtgtaataagatgattatagtttattgtagttttaaatttttaggttaaagtgattattttattttaattttttaaagtgttagaattataggtatgagttattatgtttgggtttattttattttttgggtatttttgtttattttttttaaagagattgggtttttttttgttatttagtgtggagtatagtggtgtgattatggtttattgtagttttaattttgtgggtttaatggatttttttgttttagttttttgagtagttgggattataggtatatattattatgtttgggataagtttttttattttttgtagagatggggttttgttttgttgtttatgttggttttaaatttttggttttaagtaattttttattttagttttttatattgttgggattataggtatgagatattgtgtttaatttttattttgttttttttataggattgttgattggtttatgttattttatttgtttgtttttttttattaaattgtgatttttttgagattaagtattgattgtttattattgtatttttattaattagagaaagttaaatgtagagtattaagtttaaaaaataagtatttgtggattaattaatttttgtttagagagttgtatttgttttgattagtatgaatttatagtaaagaaaggattagaaagaaagaaaagatttatgagtagttaaaatataggtgataaaatttatatatttaagtttaagttttaatttaatataaaataaatgttataattagtttgtttttttaatttaaagtatgttggaaatagtaaataaaatgttgttatatagtagtttttttttttttagtgggttagaaaaattaatagttttagaataaagagaaattttttttttttttttttttttaattagtaaagtgttatgtagtttagtgggttgagttttttaatgttaggatagagatgttttaattttgtaatttttagtaggttttagggatttttgaattaatttatgaaagtatttttagtagtattgttttaaggtattagtaaaagatttattagttataattattttttgtttaagaaggtagaggtatttttaatagagtttataaattttttttttaaaatggttaatgtggaaaaggattagtggttattagtaaatatgtagttgtttagaaattgtagttattagaagtgatgttgaagagttgtatggttgagttgttgtaagttttttgagggtagtttgttattttttttttatttttttattttttgagataggattttattgtgttatttaggttggagtgtagtggtgtgattttggtttattgtggtttttattttttgggtttaagtgatttttatgttttagttttttaagtagttgtgattataggtatgtattattatatttagttaattttttttattttttggtagagatggaggttttattatgttggttaggttggttttgaatttatgattttaagtggtgtatttgttttggttttttaaagtgttgagattataggtgtgagttattatgtttagtttagattgttttttttttttttagatagagttttgttttgttgtttaggttggagtgtagtggtgtaattttggtttattgtaatttttgttttttgggtttaagtgatttttttgttttagttttttgagtagttgggattataggtgtgtattattatatttggttaatttttgtatatttaatagagatggggttttattatgttggttggttggtttttaatttttgattttaggtgatttattattttagttttttaaagtgttgggattataggtatgagttattgtatttggtaagattgttattttatttttttttagtgtttaatgaatgtttgatgaaggatgatagggtagttggggtttttttgtgaatttagaagtttttatatatttagattttatttgaatttggataattagttatttatatgattttatatgtttgagtttggataggaattttagtatttagtttgatttttagtaaatggattggggaggatttataggtgtaggtagagaaaggggtatagttggttatgggatagttttgtaggtgttgtgttggtgtgggataaatttgttttttttttgtgtagtatgtgtgtatatttgtgtttgtatatgtgggttgtatgtatgttttttaataaatatatgggagtgtttgggagtagaatttattaagtattgaaagaagaatgatgttttgagtataaaatatgaaaataaaggtgtatagagtattttttagttgttattatataattaaaatagagtgttttttgtatatatatatgtgtgtgtatatatatatatttatatttatttttaaaatggagttgaggtagtttataattaaagatttatttgtttaatttaaaaataagaataatggtatgaaatgtagaggtaatgtggtaaaaaaaaatttaggttaaggtttatggttgttattgagtataaattttaatttggagttttttggtagttaaggtagaaagggaaattttgatgtgttgtatattttattatttagtgggaggattatagaattatagaatggtagtgttggaaatgattattttatttttttatttgatagatgaggaagaagaggtttataggtgggaagttataatttgaagttaatagtagttatttagtagtagtattgtgattggaatttgggatttttgagttgtagtttagtgtttttttgattttagtttgttgtataaggatatatgttagattgtttagaggtttttttttgtataaaggtagtagggtgggtgggatttttatgtgtgttagatttttgggttgagttttaagtttggtagtgttttgggggggtaagggggtggtgatggaattttttgtttgtttttgttgtgtttgtttagggtttatatttagttggtggtaagttaggtgtttggtgtagagtggtggtggggatagggatggggtaatgggggttttaagatggattttttttgggaagaagtttagggtttggttttgttttagggggttgtaggggtttttttttgttgtttgggattttaatttttgtagttggtgtttgaagataataagatagaggtttttttgttttgggttattttgttttggttttagatgggttgtggttagtgaggtttttgttaagatagttggttttttgtatagtttggtttttgggagaggtttgtgttgagtgggtttaggttggggtggttttgaggtatgatatttagattgggagaatagtggggattttgtggttggttgtttttttggggttgtatagtggagataggtttgtggtgtagagttgggaggtataggaatgggtgtgggggttggtgtggtatttggaagggagtttttggagtttttggggtgttaggggttagaaatggatggatattttaagttttaggatttgtagatgtgagtatagaaggggttgtgaggatatttttgttgtttttaatttattggggaggatattgaggattggttaggtttatttagtttatgtttggatttgggtagaaaagttagaattgggtgtgtagggtaaggttttaggataaaggaataggagaagaaggagggaggaggtgggtagttttgtttttattggttgtttatttgttttttattatttttatttttagtttttaaataaattttttagtttgatttttttttatttttgttttaaagatggtgttagttttgttggttttttttttgtttggttatttgttttttttagataatttatattttttttttttttatatttagttttagtgagtttgtgttttatattttatttttttatatggtttttttttttattttagatttttttgttaggtgttggttatttttttttttttttggggtttttttttgtttatttttggattttttgttttagagtttgtagggatattttttatttttatagttttattatggggatttggaatttatagagatataaggagaattttaatagttatagtgataaaaagaaaaagagaagttatttttttttgtgtttttagtggttttttttttttttttagttttttttatagaaaattttgggaggttgaggaaggagtggaaagatggagttaagtttgtaggaaattaaatatgaaatgaaaataagtttttttgatttatttttttattttggttttagttttttattttaggttattgataaagagggattttattttagtagtatagagaggagattttatttgtttttggtttttagtgggtagttagggtttggattttaggaatttttggaggaaaaggggttttgggaggttagggtaggggttgagattttaaattggggagagggtttgtttttaaggaagaggtttttttttttttagttaatgtgtgtgtatatatgtatgtgtgtgtagttatattagtgggtatatttgtgtatgtatatatatgtttaggattagggaggggaaagtgagttggtataggagtggagaaatataataatgtatatttttgtttatttttattttttttatagtaatatgagatatatttttattttttttgattttttttttttagtaaaagatagtgagaaaggttaggagttgtaaagaaataaatgggaagtattttaaatatttttggattgtattttttatttattttttttgttgtgattatgaggtattatttgttatgtagaaattgaggtttttggtaatattagtgtttttatgagtttgtttattggttagttatattggatgtttaaagaggttaggtagtgtttgtgaggaagtatgtttatattttttttttttttttttgtagtggtttttaggaagtttaaaggttttgaggtagaggaattttgagagttgatttttatatttagtttagtagttgtattggttgtgatggatggagaaatgtttttatttggagagtagggattggattttaggaaagttggtttttttgatgtttgggtttggaagggtttggtaaggttttttatggttttgtagttgaggttattgttatggttttgtttttttggtttgtagtgtgttgtttgaggtgtgtttatttgtatttgagtttgtaaagttagtagataagtgtatattaagttggtagaggtttttttttgaggagtattatggtttatttttgaattagtttaaagttatttttggtttggaagttgatttttttttatttttttttttttatttattttgtttttattattttttttttagattttaagttatgggttaggggtagggtagtttttgtttttgagttttgggaaagtttttagttttttagaaatgtttgtgtaaaggaaaaggatttaatattttttgttattaaaaattttagtgtttatagttgatttagagatttttttttttttgttgggtttttaattaggttaatattttatttatttgtgtttagtgatgggttggtttttatttttttttattattaggttatgtttttatataagattttatagtaattgtttttatagatagtattaagggaaaaattttttatttggtagttaaggttttttgtgatttgattttgttttttttttttttattgttttttttaaattgatttttttaggtttttggagtatgttttgttgtttttaaatttaggttttggtttttttttttttagttaattatttaaggtttagtttttgttttttttttaggaagttttttttgattgtttttgttgtttagtagagtttttgttttttttttaatataggggagttttgagttgggagattgtttttaataagaaggttgtagataggatgtagggaggaaggtattgtgaatttggattaataagttttagagagttatgaattttttggaaaattgtggtaaaattgtgtgtgattgtttaggagaatatatttggaggagtatttgtagtttttattagtttttttataggagtttgtttagatgattgttaagatgattagtgatttgttttataggtggtgatatttggttgttttagatttttaagtttagaaaaataaaagttttggtttaggattatgtttatggttagtgggggtaagatatttttttagtttagagtggatgattttagattgttagtttttgaggataaagattaaggttgatatttatgtgtggttgtattgttttttaaatgtattgtaattgatggggggtttaagggaatagtttgtattgtttgaaagtgaggtttttaggtgggtattttattttggtgataatggtttttttgtgttttgtaggtttggttttagaattgaagggttaagtggaggaagtgggagtgttttgggtagatgtagtaggtttgaatttatttttttattgtatatgagttgtttttttttatttgagttgagaattatgtttaggtaagttttgttttgagttgttgttattgatttttagtttttggtgttttgagaatgagttttttggaggagagtttaggtattttgagatgatttatggttttaggttgtttttttgttttattttaggggtgtgtttgtttatattagagtgtgggaggtttagggttaatttatttaattaattattgaattaggtttggttgaattttagggaagggaaggttggggtagtgagaatggtttttttttttattagttttggttatttttgttgtgggtattggaattaaggtaggtagaaggttattaggtttttagatattgtttggagggtttttttagaaagtgagttttgaaatttttaggatttgtggttaagttggaatgagtttgggattttgagtttggggatttaggttatttttttagttttaggttttttttattttaggtaagttttaaatttttgagttttagtttttttatttgtattttggatatggtaaaagtatttgtttagttttgttgttaggtagttgtaaggtttaaatttaattatgtaaaagtattttgtgaattgtatagttttaaaaagtttgtgtgtttgtgtttagtttttggggttttgtttttttttttttttagagtattttttttaggtgtttgttagttagttttttgttttagtgtgagatgtaagggatgagaagtattgagttatattaggtatatgggatgtttagagagatgtgtttttggttaagtttaagtttttttttgatttttatttagtttgtttagtagaagtggttgttttttatttgtttaggttttattttggtatggtttttattttagtttttaatttggttttgtttagtagttagttagtagtatgggtgtttttgttttttttatttttttttgatttggttttgtgttagtaaatggtttttggttttttaattagattagttttttgtttttttttttttagtttaggatttatggggtaggagggtagggtataggtttggaggtgaggttgaggaatatggggtgttttatataggtattattagtattagtttgtattatgtttttttatttttttttttttttttttttttttaaatttagtttttttttgtttttttaggatggaattttagttttttttttggttttgagttttgttgtttgagtgtatagttggagggagaatttaatatagggttttgtttattttttttatttttattttatttatagtattatatagtgtgtgtttagattttttttgagagggggtgatggaggttaattggtttttttttttttgtattgtagagagaaatgtggttttttttaggatgggggttgagttttttttttttgttttaaaatgttttttttgagtgtgttttagatatatgtaggagggtaggttagtagaagtttatatgaggttattaggaattttgtgtgtataagttgagaggtttttgggttttttttatattttaattttatttttttatatgtgtttagaaggtagaggaagatgggagttttaggtgaatgttggggagggaagggaagtttagtggtatagatggaagataagatggttaatttatttttgtatatgtttttgtttttttggtatgaggaggtttggttttagatttggttgtttatttttgaggtagttttttttattttgagttagttttgaagttttttagtttaggttttggaattttagttattgatttttggtttttgagaggtttaggtttttgttgtttattttatttaatttttttattttttttgttattggtgggggtttaagggaatttgtgaggttaaagttttttgagttgaggtttgtttattttgtttaggtgtttatggatgtgaggggtttggggaggagttggaggtgaatgagatatagttgttatttgtagatggaggttaagtttatagttgagtttaaaaataggaagttagttggggggtgttggggtgttatttttttattggatttttaatgaagtttgaggttattttttagaattgaatttttttttgttgttagtttggttttgggaatagagatgttaaggtgtaaaagttatttttataggggtatttggatgtttattaaggttaaatatttaagaggggttttatgggaaggatggatagtgaggggagaggtgttttgggggaaggggtgagttttttttatattatatttgtttgttagttggtgatattttttttttttttttttagatttagaatttgttttggtttggtaataatggggttgttttattagtgttagtttgtgtggttttttgtgatttggtgtttgtttgtatgtttttttatgtttatttttttggttttggggttagtagtgttattgattttttgagtgtgtttggggttggtagttatgtgggttagatgtatatgggtagtttgtttggagtagttagttttagtttaggttttaatggttatgagtttaatggtgagttggattgtaagattttgagtattgtggttttttgtatgaaggttaaggagtatagtgtggttattttttgggttatatgatagggtatttttgttttgtttttattttgggatattatgggttatgtttatgttttttaggtttttagttttttatttgattttttttttaggaatttggtttgggttaggggtttgatttttagtatttttagttgttttaagtttgaggttttgtggattgttgggagggagggggtagtaggtttttggtttttttttggtattgaggttttgatttttgtttttggttataggtagtggagaaagttaggtggttatgttttttagttttgtatttatgataagttgaaagtgtttttttgtttttgtttatttttttgttttgtttagttgattatgagttaatgttagatttttatgtagatttagtagttttattagtttagttttgtttattttttttgtttttagtggggttttttggttattaggttggtggttgtgtgtttgaagtataggttgttttgtagagttagttttttgtttttttatttttttttttttgaaagtatatggaatttgatttgttggggttaaggtgttagtttttatttttttttgaatagtgatgagtttgatagagtttggttgattgtattttggttgttttttaggttggatatatttggagagagtgggtagaggatgataggagttggagttgaggatttttgttgttatttagtaatgttagtttttaggggagatatgggttagttttttattggatattataggggaggagttagatttgagggaggttgagaatatagatgttataagggtttttatggtgttagaagaaggaaaggttttgggagagggggaggtatttgggtggggtgtgggtttgggtagtttttttgttttttggtttgtttggtatttggtatagtggggaggtttgggtagttttgttttttatttagagtttagttaggttttttttaggaggatgtggaggggtttgttttttttttgttttattttggtttttttttggggttgtttagtagtgttttggtatggaaggatttataattttggaatatataagttagagtttgggggttgggtggtagagggttaaaagttgtgtgtaggttttgttagaggatgtgtggttatgtttggtttttaggttttgttatggttttaaattgattgttttttttgttatatttgttagtgttattgttgtttagagttttttatggtagatgggggttttgtgtttttttaggtattaggaggtgttgtttttttttatatagttttttatattttgtttttatattttttttatagggattaggattttttgttttttttttagtttgtggaagggtttttggtttgggttttttggtgtggttttgttattgtaaatggggttgttaggatgtttttttgaaattaggttttttgtttttaggaagtggggttttgtgtttgtttgtttgatttttgtagtttgggtttggttttgagttttagtttttattttagttgggagtatatagtaattgtttagaggtaggtttgttagattttaggtggggggtttttttagtaggtagtgttttgtattgaagtgtttgttttttttatttttttttttgatttttgttatggagtagggttaggtttattatgtttagggttgtggatatagaaaggttttttgggttgggtggagggtaaatttggtgttgttgaatgagggtttttggggttgggggtgatagttttttgtttgtttggtgtttttatttgttttagaaattaggttgaggaagggtttggttgtggttttttttaatgagttagatttttttgtgaattgtagttttaaaatggattttatagaggtgaaagggttttggatattgaattaaatgtttttggaggtttggttttaagtgttttaaatatttgaggatttggagtgatttttgggaagttttttttagttttgaggtttgttgaaatgatttagatttttttaaaatttagttagggaaaggaagaatttaaggttgggaatagtttttttattttttttttttttttttttgaaatgtttatggttgaggaaggatggggaaggaaggaatttttattttgggttttttttatttatgagagaattaggataaagaggaggagagttaggtagttttagagtgggttaggagggagagtaagggaattaggataaagaggaggatagataggtagttttagagtaggtagggagggagagtgagagttttaagggggtttttttgtagtggtttttggtatttagtttttttatgtgtttgttttttggttgggttagatttaagttaggtaaattttaatttaaaagtttgagaagaaaaggtgtttattagaagattttgtggttatggttgtttgttttaatatatttaggaagtgtttaggattaaatatgttaatgtgaaatatttttgtttattttgttaaaggtagttatgtattttaggtttgttttttgtggtttggtttagtttttgggggttatttaattatattaagtatgataggattattgagttgggaggaagtttagaaattttttagttagtttagtttttttataatagagaagattttggtttagagtggagatatgattgttttgatttgtatttgttttgagattaggttgagagaggagtttgggatgtgttatttagggtgtgagggtttgggttttgttggtattaggggtggttggtgttgtatggagtttttttttttaatgttttatgggtatttatttagtagtttagttttttagaagagaattttggggtttagttttttttaagataggtggttaggtttaattttttgtattgtagagtagggggttattgttgtgttagtttttaggatgattgagtaagttagggtagttgtttaaggttatttggagttaaagtttatgaaggtaggtggagagaagtatttatttgttatgtggtttattgttatgtgaataagttaagagaggtgaggattttttttggatatttgtttaagattttaatagagatggtaatttaaaaataaagttgtgggtagttggtagatggatgggtagtttttttatattgatagtttttagtttttgttgggtataggttttagtatggtaaggtttgatattaaggtgttgttattgttttttagatgttagtattatttttggggtatgggagtgagggttttggggggtatatagagaggtttgtttttaaggttgaaatagtatttggaggatatgggtttttagaattttttttgaatttttttaattatatttgatttttagtgtttattattgtgtttttagttttgggaagtatggtggttaggttagtttaaagatattgtgatggggtaggtgtagtaagtgtggggtgggtttttagtatatatagttgtgattatattggatttagttttgtgttttattttttgttattttggttgggtagatgagggatgtttttatgaaaattatgtattttgtttatgtagttattttttttttgggttagatagtggggggttatttttgagaatttgaaagatatgtgggggtttttggtttgttttatggtttttattgtttagtgtaaaggtaaataggtttagttgggggaggatggttggtaaattggtttttaggataatattttgtgattatttagttaaaaaataagaaggtgataatgatttattaattttattttattttttttaggatgttgtagggaggaaaggtgtttttatgatttaattttggtttttttttttttttttttttatttatatatatagagttaggtttttatattattgattttgaaggatagtttttaatgtttaattatttgtttaggtgtgtagtggttgaaaaaagaaagttgagtgttagaaggaatatgaattttaattgttatttattgtttttattgtaagatattttaattttgtataaatgtaattttttttttagtttaatggtttggggtggaatattaaaaatatatattaaaaatatagtaaaaatttagaaaaatgtaaaaaaaaaaatgaggttggttttataaagttttattgtttatattattatgtaattatattatagtaaaatattaaaagaaatgtttttgttttttaaagtaagttattgtatttatattttttttgggagaggaggaatatggatgggaaggagatgtaggggtttaggtatggggtaaaatggagtgtagaggtagttgggtatttttagaatattttttgttggtttagtttaaattgtttggttgttgttatttgtaataaattttttttttttttttt

SEQ ID NO: 9 - DNA, 221909 bp, Artificial Sequence
  chemically treated genomic DNA (Homo sapiens)
aaaattttgtttttattaaaaatataaaaattagttggttgtggtggtgtgtgtttgtaattttagttatttgggaggttgaggtaagagaattgtttgaatttgggaggtggatgttgtagtgagttgagattatgttattgtattttagtttgggtgatagagggagattttgttttataaataaataaataaattaggtgtggtggtttatatttgtaattttagtattttgggaggttgaggtggggggattattttaggttaggagtttgagattagtttggttaatatggtgaaattttgtttttattaaaaaagaaaaaaattataaaaaaaaaaaaattagttaggtgtggtgggtatttgtaattttagttatttaagaggttgaggttggagaattatttgaatttgggaggtagaggttgtagtgagttgagattgtattattgtattttagttttggtgatgagggtaaaatttttttttaaaaaataaaaaataaaaataaataaataaaaataaaatttgaggtttaaataattaagttttgtgtatttttttaattttttttttttttttttaattttaattttatgatagattaagttttatgtattttaaaaatgtgtagaatttttatttttagtttttttttttttttttttgtttttttttttgattttttggaattggaaggaaaatttggatatttaggaattattatataggaggtatttatgtgatgtgtttaatattattttatgtaggtgtttttgggttttgggtgtttaggtttttgtgaattgtgattttaggtagaagtgtgagtatttgtagaggaatttatttatttaaagttagggaatagttagggttggtatttttagggtgattgtgttttagggtatttttgatttgtgttgagtaaaatggataaagttagtaatgtatttataatttagatttttgagatattgttggattttgggaattttaggtattaggtttgtggtagtgttattatggttaggttgggggtagtgttattatggtgtttgttggttaagttaggatatggtttaagttggaatttgttggtgttggtataagtggtgagtgggtgtgtgggtgggggttgtggttagggtgtggatattttagaatttaggatgttgtttataatttgtttatattttttgttttttttttttatagtattttttttttgaggttttttgagtttttaatttttagataaggaaaggggtggatttagttgaagtttagtgtttattttggtttaattagttttatttggggtgaggggaaatttttttggttgggttgttttttttgtagggttgtggttggatagattatttaagaaaggaagtaggtgggttggaatgaatttatggtgttatataggtttttgtttttatgtatataagttttttatatttaggtaggaaatgaaaatgttttttggatttttaaggagagtaaaggagaggggaagaggaggaggattttttggggttgttagtgatatttttagttttttgtgtatttttgggagggttgtaggagaaggtaatgttgtgtttttatttagaattagtgagtgttttttaattggttttttgttttttttttgttttttatggtttttattggtagttgtgtaagggtttggttttgtttttgtttttttatatttgttgtgatattttaggttttttaggttttgttatgttttttttttttttgggaatagttgttttttattattttggttgtttggttaatttttgtttattttttaaaattttgttttgattttgttttaataaaattttgatattattttttagttataattagttatttttttttttgtatgttggaaatattgttttattgtggagattttaaggatatttaagtagagagaatttttttgtgtaagttttgtatttttttattattgtttgtgttatttgagttgtaaagggtggttttttgtgtttgttttgttgtattgatatattgagttgtgtatggtgtttagtgtagggagaataaatgattatttgtttaatgtgtttatttataggtgaggaaattaaggttttaatttaattgatgtattttgtttttttgattattagaaaagtagtaggataggtgttttgttttgttttattttggtttattaagttggtattttggttttgatttttggttgtgtttggtgttgttgtggtgtttggtgttgttgttttgtttggtggggttgtttggagtgtttgtatttttgtttgtttttatttggttgggtttgttttgtttggatttgggattgggaagtgtggtgatttttggaattagttattggtgttagtgtggggagttgggggtgtagagttgtgggtgtggtgggttatgtaggtggtttttatttttggtttggtttggtttggtttggtttgtgttgttgtgtgggggtgtttttttttaggtttggtgtttgttagttttgttttgttaggtgtagtgtagtgtaggggtgggtgggggtggggtttggtgtgtatgtttatggggtggggagggggtgggttaggggtgggattatagttggttgggttggggttttatgtgtatttttggggaggggtggggtgggggtggggttggggtggggtttggttggtgtattttagatggtgggttgttttttttttttgtttttttattattggtttaggattagtgttttgggagtgtgtgttttgttgttttgttgttatatttttttgggagtggtggttatggaggtattatgaagaagttttatttaggtgggttttgtgtttggggtggggaggggttggtgttttgggattagtgttgtttatttgagtgtttgtggttgggagtggtgaggtgtttttggagttgagtgagtttttgtggtgggtatattgtaggttgagttttttttaggatagggttgttgttgggttgtttttgatttgagttgattgttttttgtgttgtttttagtttttgtttgagtgttggaggggttgttttgggggatgtttttttttttttgttttttgtatttttgtaggaattgttgattttttaggttggttgggtgttttgggtttttgtgtgtttgtgtgggtgaatggggttggggttaggtggaggggtgtttttgggtttagtttttagggttggtggtttaggttgtagtattttttttttggattttttttggttttttttttatttagtggggtatgggatggtttttagatgggattgtttagtagtgtttaaatttggtgatttgggtttatgttttgtgtttaggatgttgtttgtggttgatatttttattttattttagtagggtttgttttaagtaggtgaagggggtttgatttgggttttattatgagttggtttaggagtttttattttataagaggtttttgttttggtattttgaagttttattttatagatgggtatattgaggttataagggtaggttaagagaaatttagatttttattatttgtttttttttttttttttttttttttttgtggttttttttaaaggatttaggtaggtaggattttttgttttttttagtttttaaattataaatagtgtttttttttttaaatttagaaattgtttgtttaatgttttttttttaatttatttagatagaaaggtatttgttaaggatttatgaattaatttttattgataggagaatagaattatgggttttagttggaggtgaaggagttattggggttatttttttgtttttgggttattgttggttttttttggttttttatatttaggaattaaaatgagtgataaagtattttgttttaaagaggattatttagaatttttttgaaaatatttttttgggttagtagtttagaattttaatttttatttggttgttgtgaataagatggttttttatgtatttggagtatagttttgttaggagtgtgggtgggttggtgtgttggtgggtgggagtgggtttttaggtggtatatgtttggttttggtattggggttttttttttaatatgttttaaatatttgagattgttgtggggattgtgtggtgtatggttttttttaggggatttttagtttgtttagggagggttttttgtttttggttttttatattttattttttattggtgggtttagatagtgggggtgattggggtttttttaggttgtgggttttgggttttttttgtggagatttttttgtatagatgttggaagggttttgaggtaggtttggagtttttgtatttgtggtttattgggaggtggggagattattatttgtttttttttttttttttttatatatatttattttattttttattgggttttttttttttttttttttttaaaaaaaaggatagaattttttgtagtaggtggaagtagagtttgtggagtgagtaggaattaatttttgtatagtagttttggtgtttttttgtgtttatttaaaggggtaggtttttttgaggatgggggaagggagggtttagattatttttggtttgttttttgtttggtagtggtttaaggtgtgttgggttattgtgttgtagttgtatggagtgggattggagggggttgatggtgggggtggttttttgtttttattttgagtgttttggagttgttttggtattagtttttttttgggtatgggtatttgtaggagttaggttgattttttaataagttattgatattatgaaattaaggaaagtagtaaaagatgttaaaaattttttaaggttttgataatttaaggataataggaaggtttttatttttttatttagattgtgtgggattattgtttttagatttgtatgtgggttttagaataaatggaatgattataatgttgtttttggtagatttggtttgaatatttgtgagtttttgaaaaggagaaagattttagaaggatgtgttggggtaattttaagtattgtgggtttatagatagttattgaagatattttatgtgttgggtatatatggttaagtttgagtgggtatagaaatggtaatgagatatagtttttgtttgtagagaatttatatttttattgggagttaggatgagggtgagatattagtttattaatattttttttttttgagtagtttagtttttaaatattataggaatgttttggaggttttaggtggaggtgagattgagttgggttttgaggaaggagaagttttgagtagtggagaataaaaagggatttggttaggtgtgtttgaagttttagttatttaggaggttgagatatgaggattgtttgagtttaggaggttatttaggaggttgagatatgaggattgtttgagtttaggaggttatttaggaggttgagataggaggattgtttgaagttaggagtttaaggttgtagttttgtgatagtgtttggaaatagatatggtattttagtttgggtggtgttatgagattttatttgtaagaaggttttttttaatgtggaaggtagtaagggtttatatagggtagttgtaggatttagggggatattggggataggttttttttggtagttttattgttgttttaggtttttttgattgttttatttggttttttaatggggtggaggtagtggtagtttataggtagtgtggtttagtggttatatttgggggtttagagttgttagttttttgggattaaattttattaggttgtgtttttttttgtggtataaggtttttattttatgtattttatttgttttatttgtttttttgtgtgtgtggtgttttttaattttatttatttatttatttttgagatggagttttattttgttttttaggttggagtgtaatggtatgattttagtttattgtaatttttgttttttaggtttaagtgatttttttgttttagttttttgagtggttgggattgtaggaatgtgttattgtgtttagttaatttttatatttttattagagatggggttttattatgttggttaggttgattttgaatttttgattttgtgatttgtttgttttggttttttaaagtgttgtgattataggtatgagttattatgtttagtttgttttatttgttaaatgggatagtgttatgttgttgtaaaggttaaatgagtttatatttgaaaaagttgagaaatgtttgttttgtaatttgttagttgttgttatgattatgattgttattgataggaggatggagaaggttggggttatgttattgttaggatgttttagaagtttttatgatttttttttattgtggttagagtatggtgtagggttttttttttagttttttagtattggagttagttgtattgtatttgttttggttttttaggttttgagttttgggattttttttgtatattaggttatatggaatttgttgttatttttaggtttttttggaaattttttgtgggtggtagtggtaggaggatttatttgaggttgatgagttatagaagtgggattgaggttgtgttatatttttattggtatttgggaattattttggagattttttttttattttttatttttttgagatggagttttgttttgttgtttaggttggagtgtagtggtatgattttggtttattgtaatttttgttttttaggtttaagtaatttttatgttttagttttttgagtagttgggattataggtatgtgttattgtgtttagttaatttttgtattttttagtagagatggggttttattatattggttaggttggttttgaattttggattttaggtgatttatttgttttagttttttaaagtgttgggattataggtatgagttattgtgtttagttattttggagtttttttgtggtttttaggagatttttgaaggggtattagttatgattaaaaagttttatgttgttgtgatttttgagttttgggtagggagggaggttgtatttatataggaagtagtttttgttgtgatttagtgtgttggtttgttgtggtggatagggttgtatttttatttagtgttttgggagttgatttatgggaagggtaaggaattgtatttttagagaatatttttttagttagttaatttggtgataggtgagtgtgggaagggtataagtatagggtttttttttttttttttttagttttgtttttgtgtttgtttttgttgttttttgtttttttatgtttaagtttgtttgttttggtgtatttaggggatttggattggagagaaaaagttattttgtatggttagtttgtggttttgtttgatttgtgttttttgttgaggttttttagttgtgagatagttggttgagtttaagttttggggttagttttttttttagtttgttgtaaaggtagaaaggtatgtttaggtaggggttatttgttttgtttgtttatgttagattgtaggtatttgtttgttagatttttttggtttgtttagagggattttgatagttgagggtaatgtatttggtagtggagtattgtgtttgtgatagtttattttttttttggaattattttttataagtgtgattagtttaagttaggataggtatagggggatttaggattgttatttaggggtagtggtttggaatttaggtttaggtgatatgggagttaattttttgtttggagattttaggtgggtgtttgtagaggatattttatttgaggatttatggaaggggatattttttattttttatttggtttttgggttgtttttttttgatatttttttgttattttaggtagttttgatagttttatgtgattgggatttagaggtggtttttgtttttgttttagtgtttgtttataggtagtgttgtgtgggttttgaagtttgtttaagatggatttgataaggggagtttagtatatattagtgtaggtttggttagggggtgatgatggtagtttttgggtagatttagttggttttagggtaggaggggttttagagagaggttttaggtttttaggggtgtgaatttttggggtgaggtgggaagtgatgtgttgggtttttgtgtttttgtttgttggagttattattttggaaatattttagttttaggtggttgttagggatttatggggattagtgggtgttaatttttgggtgaagtttttggggtttgtatatagtatatagtgttgtggttttatggtttattttgttgtgtgaagtggtttagtttttgggagagtttttagttaggtaggtttgatggtaattgttaggttatggtgatttggaattgttgattaaagggagttagttttggtgggtggagggatttggtgggtagttattgtgatgttaggtatggggattgtgtgttatttaggtttgtgggtgttgagtttttgtgggagtagtgaagtgtttttgtggttgatgggttggttatttttgttttttttttgatgtgatagttgtgtttgggttttgggaaatttgttaggaggtttggtattggtttgttttattggagtggttttgttgagttgtgagttgtttgtttttttgaggtttttagtttattttaattttttatgtggatttggttatttattttagaagtgtttgttgggtgttgttgagtgttaggttttgtttgtttttttttttgtatgttggaggttttgggtattagttttgtagggtggtttggttttgggtttttagggtagagtatggtattttttgtttttagtttagtttttttttgttttatttttttgattttattttgggtatgggtttatttgtagtttttgtgaagggagatattgagttgttgttggtagaggaggggtggtttttgggtattgtttgttaatggttttttggtagttttgtgatagttgagttttgtttttagtttaatttgatttggttttttaaagtatgattgttggtagtttgaaaatttttaggataggaaataggagtggtgtagggaatgtaagatgattttagttttaagttattgggtggtttttagatttaggttgtttgttgtttttggtaggaatttaagttgttggttatttttagagtggtgttggtttggggtttttagtggtttttgtgtttgggtgagaggaattttggatggttattttgttttgagtgtgtgggtttttagaagtgttgggttagggggtatggagggttagaaagttttttttggagtgttggatttttttgttgatttttattttattttggtttggggttttagagaaggggtttaggtaggagtgttatttttttttaatggggatgtggttttagtttttgtttaggtgggtgtattgttttttttttggttttttttaggttgtttaaatgatttgtgatgaggtttgtgttatggttggggttttttgttttttttagtgttgtatttgggaattaggggttgggttttggaagttgaggatgtttttgaatgttatgtttgggtatttgttttggttaggtgaggtgtgttggggtagtggttgagatgggagtagtagtattgtttgttaggtttgagatgggttttgggtgagtgtggttattaggaagggttgggtagagtaggtgggtgggttgtttttggggttttgttttgtagattaatttgatttgtattttggggttggggtttttttttatagtttttttatgaattatggtttttgtttttattttaaattagattttagaagaggaataatgtttatgtaatttaagttagttggaagtgggttatatttaatttttgttattttttagtttgttaaggatttgattaatttaatttagagggatttggagggttgtttgtaaaatttattaataatagggaattttagttttgtagttatagggtttatagaggtgttgggttgttgggttattgttgggaggtgagttggtggtgtagatattatggaggtattggtagtggaagagttgtaagtgtatatagaggttggtattgaggggtggggaggaggaggtggtggattttttgttagtgttggtattatgttgtttttagtattagagatttaaggtgtggttgattttggttggggtgatgagttattggatagtagagtttttttggtagttgggggttaatgttttaattgttgggattttgtattatgttgttttttttttttgttttgtttggtttggtttggtttggtttttgagatggagttttattttgttatttaggttggagtgtggtggtttaattttggtttattgtaatttttgttttttgggtttaagtaatttttttgttttagttttttgaatagttgggattataggtatgtgttattatgtttggttaatttttgtatttttagtagagatggggttttgttatgttggttgggttggttttaaatttttgattttaggtgatttatttgttttggttttttaaagtgttgggattataggtatgagttattgtgtttagtttgtatttatgtttttttttttttttttttgagatggagttttgtttttgttgtttaggttggagtgtaaaggtgtgattttagtttattgtaatttttattttttgggtttaagtgatttttttgttttagttttttaagtagttgggattataggtttgtgttattatgtttggttaattttgtatttttagtatagatggggtgtttttatgttggttaggttggttttgaatttttgattttaggtgatttgtttgttttggttttttaaagtgttgggattataggtgtgagttattgtatttggtttatgttttttattattattatttaattttttaaggaaagtaatttaaattgtatattgtatttttttttttttttttgttttttgttgttagttttttgtattatttattgttaaataatatgaataggaaattgaaaggaaaattttaataattattggttgtagtattttttttgtgttttatttagtgtttgtttttttaggaatatgatatagggtttgatttaattatgaaaggtgtatatttttagagttttatattttttatagaatgaatgttgaattttgttttttttatttgaaattagattttaggtatggattttatgattattattataatggttttttagagtggatattgtattttgtagggaattattttttttttagttgttggtgtggatgtttttttttgatggtgtgggtttgggtttttgaagggtggtgttttgagtaaagatgttatagtagttatgtttatagttttgggtttggggttaggtggagattggttttaattttagagtttgttgttttaaaataaatttttttttttttttttttgagatggagttttgttttgttgtttaggttggagtgtagtggtgtgatttttgtttattgtaagttttgttttttgggtttatattatttttttgttttagtattttgtatagttgggattataggtatttgtttttatgtttggttaattttttgtatttttttagtagaggtggggttttattatgttagttaggatggttttaattttttgattttgtgatttatttgttttagtttttaaagtgttgggataaaataaatttttagggttgggagtggtggtttatatttgtaattttagtattttgagaggttgaggtgggtagattataaggttagaagattgagattatggtgaaattttgtttttattaaaaatataaaaaattagttgggtgtagtggtgggtgtttgtagttttagttatttgggaggttgaggtaggagaatggtatgaatttggaaggtggagtttgtagtgagttgagattgtgttagtgtattttagtttgggtgatagagtgagattttgttttataaataaataaataaataaataaataaataaatttttatatttatttgtattatttattattattattattaaatagggttttgttgtgttgtttaggttggagtgtagtggtgtgattatgattttttagttttgattttttagttttaattggttttttttttttagttttttgagtagttgggattataggtgtgtgttgtatgtttggttaattttttttttttttttttttttgagatagagttttattttgttgtttaggttggagtgttgtggtgtaattttggtttattgtaatttttggtttttggattaaagtaatttttttgttttagttttttgaatagttgtgattataggtatgtgttgttatatttggttaatttttgtatttttagtagggatggggttttattatgttggttaggttggttttaaatttttgattttgtgatttatttgttttggttttttaaagtgttgggattataggtgggagttattgtgtttggtatgtttggttaatttttaaaaaatttttgtagtagttgggtgtggtggtttatgtttgtaattttagtattttgggaggttaaggaggttgggagtttgagattagtttgattaatatggagaaattttgtttttattaaaattataaaattagttgggtatggtggtatatgtttgtaattttagttatttaggaggttgaggtaggagaattgtttgaatttaggaggtgggggttgtagtgagttgagattgtgttatggtattttagtttgggtaaagagagtgaaattttgttttaaaaaatttttgtttttgtttttgtagtgatagggttttgttttgttgttgtttaggttggtattgaatttttagttttaagtgatttttttgttttagttttttaaagtgttgggagtataggtgtgagttattgtgtttggtttttatttgttttggttgtttttttttgttttaggtaattatatatttttttaggtaattaagaaaagattgtgtatgatgagttttttttttggtatttttgggattgtttttaaaattagataagtgtttttattttgatattttattaagattttaatgaatagaatgttgtttgtttttagtttgttggtttttttgtgaaggtttagggtttttttgtttgaaaagttatttttttgttgaggtttttgatttttttttattatggtagttatgttgagggtttatagagttattttttttttattttttttttggttttttaagatgtatttgtatttttggagatgtttttttgtttttttgggttattttttttggttgttatttattttgttgatttattatttgtgtaatagttttttttggaatttttaggtttttgttatttattttttgtagtttttgttttgttttttttgttttagtttttttttttattatttttttatttgttggtttttatttttgtttatggtatatttttgtgttatattttgatggttggataaaggttgagtgaaatgtatttatttttttggtgattggggtgtttattaattagaagggatttaaggttggtgtagtttttttttgtattttggggtattgttttgtggtttttttttgttggagtttgtagttttttgtttttttttttttaaattttttgagatggagttttgttttgttgtttaggttggagtgtagtggtgagattttagtttattgtaatttttgttttttgggtttaattaatttttttgttttagttttttaagtagttgggattataggtgtttgttattatgtttggttaattttggtatttttagtagagatggggtttttttatattggttgggttggttttgaatttttgattttaggtgataggtttgtgttggttttttaaagtgttgagattatgggtatgagttattaggtttggttgttgagattatttttataagttattaggtttggttgtagttggtagtttttgattattggttttgttttatgtgatttgtgattttttttttggttttttggttttgttttgtttatttgtttattttttttatgtatgtggtttgtttatagggtatgtaatggggtttaattaggaaatggaaattgtttgagtatttatttatttatttatttatttatttatttatttattttttttaagataaggttttattttgttatgtaagttgaagtgtagtggtgtgattatagtttatggtagttttgaatttttgagtttaagtgattttttttttttagttttttaagtagtttggattataggtgtatattatatgtttgtttaatttttttttttatttttgtagagatagggttttgttttgttgtttaggttggttttgaatttttaattttaagtaatttttttgttttagttttttaaagtattggagttataggtatgtgttattatgttttgttaatttttgtattttttgtgtgtgtgtaaagataaggttttattatgttgtttaggttggttttgtatttttgggtttatgtgatttttttgtttgggttttttaaagtgttgggattataggtgggagttatagtgtttggtttatttgagtatttagaatagaaggatttaaaggtggggaattagttatatagatgatgggagaggtgaaggttagatagggaatagagaggtaattagtaggaaattaaagtggtgtgggtttatatagttttttaaaggtatggatgtaatgatttatttagaatgagaaaataaataatagtaaattataaattataagtagttgttaaatattataaatattattatatgtagaagagtattagttaattgttagttatatttttaaagttttattttttttatatttttggtattatttttttaatatgatgattttgtaatattgttttttattttgagaatagaaaattgattaggttggatatagtggtttgtgtttgtaattttagtattttgggaggttaaggtaggtggattatttgaggttaggagtttaagattggtttgggtagtgtggtgaaattttgtttttattaaaaatataaaaattagtagggtatggtggtatatatttgtagttttagttatttaggaggttgaggtgggaggattgtttgagtttaggaggttgaggttgtagtgagttgtgattatgttattgtattttagtttgggtgagagagtgagattatgttttaaaaaaaaaaaaaaaataataaaaaaaaatataggttgggtgtggtggtttatgtttgtaattttagtattgtgggaggttgagatgggtggattatttgaggttaggagtttgaaattagtttggttaatatggtgaaattttatttttattaaaaatataaaaaattagttaggtgtgatgatgtatgtttgtaattttagttatttgggaggttgaggtaggagaatggtttgaatttaggaggtagaggttgtagtgggttaagattgtgttattgtattttagtttgggtaatagagtgagattttattttaaaaataaataaataaataaagtgaatgaatttttttagttgattaaattttgtttttatttttggtagttgggatgtatataaaagtggtggttaatatggagttggtggtgttgttataattgttttgtttaagatatataggaattttggtaaattttgtttttttttttttttttaaatgtgatttttattaagaaagaagtaggaaaatgggggagatttttaattgtatatgaggtatttgtgtatgtatttttgattagagagatttttttgttttgattttatattgaaggaattgaattttttgtttataattttatttttggtgatgggagtaattttttatagatttgtttttggatttgtgtattttaaattttgtttttttttattgtgtatgtttttttggtgttaggtattgtaggatatgtttgtgttttgtgatttttgattttgtgtggtaggtggaattggaatggtgagtggagtgagtattgttggaatttgtttttatattgggatagtgagtagtaattgaattatatatggaaataaatgggaattatataaatataatttgattaaagttaaattaaatatttttttagtttaatttttttttagtaggagtttttatgtggtagtaagtttttgtttttattttatataagagaaaatgtgatgggtaggaatttaagattggaaatgaatggggatgttaattgattgtagggaaaatattttttattttgtaaattttataaaaaatgtttgattttgtggatatgtggttagggttttttttagtgttttgagagggaattatgtaggtagagggagggtttttagtattgtgggggtgatttggagattggtagtagggtgttattattatttttaggtggggatgagagggaggaagttttgtgattagagtttaggggttagagttatttgttgggagtttaaataaaggtgggattttggtaggagttggaattatatagaggattattttttttgttggagaagttgtttgaggtagaggaggtggagagtttttgtgtttttttttgtttttattttttaggttttttttaagttttttgttggttgaatttagtttaaagttagtaggtttggggatttggatatttgagttagtagaggttggtgttttttttatataaaggagggtataagaagtgggaggtatggagggggattaggttaggatttatataggatgtgtaaataggagtttttttttttttttattttaaatggtatttgtagttggttttatttttttgttgttagataggaagaggaattttgtttttggtattagttgtttttattgttttttattttatggaggttttttttttttttggtttttgtttgtaattattggtgatgttgatggattatattttttggggagtttggttatgaatatggttttttatttgttgtggattaaattgtgtttttttttttgaatttttgtgttgaagttttaatttttaatgtagttgtaattgaagatagggtttttagggaggtaattaaggttaaatgaagttatagggtaggattttaatttaataggattgatgtttttataagaagagggagagatattagagattttttttttttttttatttgtaaatagaggaaaaatgatggaggatatagtagggaggtgggtataagttaggaagaggggttttgttgggaattaattttgatggtattttgatttgggattttgggttttttaaattgagaaatatatgtttgttgtttaagttattttttttatagtaatttggatggtagtttgagtttattaaggtattgtttgtattagttagggttttttagggagatagttaataggagatggatggatggatggatggttagatagatagataagtggatagagagagagagagataggtagatatagatagataggtagataaatggttagatagataagtagatagagagatagagatagatagatataaataggtaaatagataggtagataaatggatagatagatgatagatagttaggtaggtagatagatatagataggtagatagatagatagatagatgataggttgggtttagtgatttttatttgtaataattagtatattggtaggttgaggttggtggattatttgaggttaggagtttgagattagtttggttaatagggtgaaattttatttttattaaaaatagaaaaattagttgggtgtggtggtgtatgtttgtaattttagttatttgggaggttgaggtatgagaattatttgaatttgggaggtggaggttgtagtgagttgagattatgttattgtattttagtttaggtgataaagtgagattttattttaaaaagaaaaaaaagatagatagatgaatggatagatagttagatagatgatagatggatgataggtagatagataattgataaatagatataaatgattgatggataggtagatatagatatattgattaggtagatgatagatggatagatagaagatagatggtggatgggtgggtagataggtagatagatagttagaaagatagatgatagatagataggaaggaatttattaggggaattggtttatattattgtggaggttaagatgtattatagaaggttgtttgtaagttggaggtttaggaaagttagtattgtggtttagtttaagtttgtaggttttaggattgggaagttgttgatgtaatttttagtttaaggttaaaggtttgagagtttggggaattgttggagaattgggagttttaagtttaagggtaggagaggaaggtattttatttttaggagaaagagggaatttattttttttttgtttttttgttgtttggtaatggaatggtgttatttatattgagggaggatttttattatttagtttattaatttatatgtttattttttttagaaatatttttatagatatatttagaagtgatgtgttattagttattttttaatttagttaaattgatatttgttgttagttattatataggtttagaagaattgtggttgtatggtgatggtttttattttgtttaaagaagttgaagatgaattgttggtataagttattgtttttttaggttttttttagttgtttatttttttaaaaatgtatttattgagtatttgttgtatgttaggtgttgtgataagtattggggtatagtagtgagtaaataaggatttttgttttttggagtttatatgtagtagaaggaaatagaattaatgaatttattagttttagaaattattaaaataggattaagagttgtggtgagaattaagataaggtgattgtatagaaagtgattgatggttgttttggaatgagtggtgaggggttatagagatgatgatagttgagttgagattgggaagataggaaggagttagtagtgtaaggattaggttggaagtaagtttggtgtattttaggaatagtaaggaggttagaggggttgtagtagagtaggtgaggaggaggagggagatgtaggttaaagaggagtttggggttagatggaggattttttttttaaagtttagttattttttttttaaaggagaatgtgttatttttaaaagttatatatgttagtatagtgtttggtttattatatgtttttagtaggtggtgagtatggttgtttttgttattattatattataattattaggaataatggagttattaggttttgtatttatagtaatgtgagggagttagtaagtttttttggggaatttatttttttttattaagtttataagagtttgataattaggttaatgtagtgagagttatagttgtttagtgtattggattttttagttatgggttaggatatttttattttagtagaaatttttaaggggattggggagtgtgttgtggatgtttttgggttatttagattttttggggagttttttttattgtagttgttgtagggagtttagttgtagtgatgaattgtggtttagttttgtttatgggaaaattttatatgggagatgggatggttttttgttggtttttttggttttaggttgtttttataagtgtagggatttttatttgggtgtgtgaatggggtttaggatgttttaagggtatgtggagatgggggttagttgttttttttgatgtttttgaattttttttttttgtttttttgtattttattgttttttggttttttttattttgggtgttttggaataatatgtaatttaatatataggttgattttattattttgttttgttttattttattttattttggaaataaaggttttgttatttagtttggagtgtagtggtgtaattgtaatttattgtagttttgaatttttgggtttaagtgatttttttgttttagttttttaaagtgttgggattataggtatgagttgttgtgtttggtttaggttggttttaaaagttttttattttttttgtattttgatgatatttattttttggagtaggtttttagttattggttttggatattttgtagttattattggttagttgtggtatgtgaagttgaggtttaggagaagggtagttttgtttaaggttatatggtttagtgttaatatttagattttagtgtttttattttttttttggttgtttttatttttagtgtatttttggaggtttaagggagttaaaggttaggttttggttagttaagaatttaaaaaagttgtttttgtgtttttttgttaatttattattttattattttttttgataatgaatttagtttgaattttagataaataaggattaatttttagtataagtatattttataatagatttgggatatatttatgtttaaaaatgatttattgtttgttggttttagtagtttatgtttataattttagtgttttgggaggttatagttggagaattgtttgagtttaggagtttaaggttatagtgagttatgattatgttattgagttttagtttgggtgaagtagtaagatttttatttttttaaaaaattgttgattgtttatttgaaatttaggtttaattgagtattttgtattttatatgagaattttatataggtgagatttagagttttaatgtttattggtaagtttttgtagggaggttttgtgggtttttggttggtattgatgttttgtgatgagtagggttatttggtaaggtggatgtttgttgtttatgtaggtagagtaaggttttgggtaggtatgagttgattttattttttttagtttgggagttagatattgttggtagtttgttgttaagagaggggttggttattaagagaggggtggtttttatgggttttttttggtttttggtttttttttagttttttttttattttaaatagaggttaatggtattgtattagaattagtgtgttgttttttttggttggtattttgtagttgggtagattgttttttttttataggagttggtggtgttttttttgttttatagggaggatggttgagatttttgattttgatatagggtgttgttttttttttgttttgagatagagttttggtttttttatttaggttggagtgtagtggtatgatgttggtttattgtagtttttattttttgggttttagtaatttttttgttttagttttttgagtagttgagattataggtgtgtattattattgagaataatgttttttatagtgtttatttttttgtaggagtaagtttttaaggtaaggaggttgttttttttatggatgaataaattgattttgatttatagttttatgtgttagttttgagggtggggaaaggttgttttgtgtttaggtagggggtgggggtaaggttaggagggtttggtgtttagtgtatttttttaggatataattttaggtagtagaggttaaggatagaggggaggagaagagggaggtggttattatttttttattttagttttttttggagataagtttgagtattttagttgtttattaagtttggagataagtttggaatttaaatttttgattttgatttagttttttatagtttttgtgagtaaattgagttttagaaaaagggagtgaagtttgtgtattttggatgtttttattttaggtttaaattgtttttattttaggtttaaattgtttttattttagtttaaattgtttttattttaggtttaaagtgtttttattttagtttaaagtgtttttattttaggtttaaagtgtttttattttaggtttaaagtgtttttattttaggtttaaattgtttttattttagtttaaattgtttttattttagtttaaattatttttaatataggtttaaattatttttaatttaggtttaaagtatttttattttaggtttaaagtatttttattttaggtttaaagtgtttgtaatttaggtttaaagtgtttttattttagtttaaattgttttattttaggtttaaattgtttttattttaggtttaaattatttttattttaggtttaaattgtttttattttaggtttaaagtgggaaggagttatagggaaataaatgggggaggtatggatgattaggatgagggtttttatgatttatttttttttaggggttattttaagagttttttaaatttttattattttttaatagagatggggttttgttgtgttgtttaggttgatttttaatttttagttttaagttatttttttattttagttttttaaattgttgaggttataggtgtgagttattgtatttggttttttttaggagttttaagaaaaaaaatgggaatagatttgtgtgtgtgtgtgtgtgtgtgtgtgtgtgtgtgtgtgtgtgtgttttgagaaagagttttgttttgttatttaggttggagtgtaatggtatgattttggtttattgtaatttttgttttttgggtttaagtgttttttttgttttagttttttgagtagttgggattataaatatgtaggttgattttgtatttttattagagatggggttttattatgttggttaggttgattttgaattttggattttagatgatttgtttgttttggttttttaaagtgttgggattataggtttgagttattgtgtttggttaggaatagatttttttttgtagatgatttttgttattattgaaaatggatgtttatgtataattgaattgttataatgttttattttaaaaagtttttttttgagaaaatgtgatttttgatagaggagagattgtttaggttttatttattgttagtataaaggtagagtaggggtgtggtggtgttatttttttttgagatagttttatttttgttttgtttaggggtttagaagtttggtttatttgagtttatagaggggtttggagtggttgttttatattataggtggggtttgtaaggatttgaaatgatttttgagaaggtgggtgtggtgggtgtattttaattattaaagtaataataatgatatattaaatagtgtttgtttagattttgagtgtttgtttaaatatttttattttgtgatttgttagattttagtataataatttaggtaaaagaaaaaatagttgggtgtggtggtttgtgtttgtaattttagtgtgaggttaaggtaggaggattgtttgagattaggagtttgagattagtttgggttatttgagattttatttttgaaaataaataaattaataaaagatttttatgttttatgttttttttatatttaggttttttaaattatatgtattggggaaagtttattaagagaagtttttggttgggtgtggtggtttatgtttgtaattttagtattttgggaggttaaggtgggaggattataaggttaggagtttgagattagtttggttaatatggtgaaattttatttttattaaaaatataaaaattagttgggtgtggtagtgtatgtttgtaattttagttatgtaggaggttgaggtaggagaattatttgaatttgggaggtagaggttgtagtgagttaagttggtgttattgtattttagtttgggtgatagaaaaagattttatttttaaataaataaataaagggagagaagtttttgggtttttagatatatgggttagtgtttatttttgtaaagttgttgtgtttaaagaggggttgtatttggtggaattggggtaaaagagtagggagggtattgggtagttgatttggtttttattattggaaaggggttgtgttgttggtgttttgagttggttttataaggaagatattgtatagggtgttttaagtttgttttttttgtttaggtttatttttttttttttaggattagggagttttgtttgttttttgtttttggtatttgttttttggtttgtgagtattgtatttttttttgtttggaatgttggtttatggtgggtttttggatttttgttttttgttgttttttgttatattttgttaaagtgtgttttatttatttattgttattattttttgaaatagagttttgttttgttgtttaggttggagtgtaatggtgtgattttggtttattgtaatttttgttttttgggtttaagtgatttttttgttttggttttttgagtagttgggattataggtgaatgttattatgtttggttaatttttgtatttttagtagagatggggtttttttatgttggttaggttggttttgaattgattttgggtgattggtttatgttagttttttaaattgttgggattataggtgtgagttattatgtttggttaattattataatattgatattataataatattatagttagataatggtgattaatgtttgtaatttgaatattttgggaggttgaggtaggtagattatttgaggttagtttgagattagtttggttaatgtggtgaaattttgtttttattgaatatataaaaattagttggagtgtgatggtaggtgtttgtaattttagttatttgggaggtggaggttgtggtgaattgagattgtgttattgtagtttaatttgggtgatagagtaagattttattttaaaagtagtaataataataataataataataatattatttattgagttttaattttgtgttaggtattgtgttagtatttgtgttatgtgattttattgatttggaataatttatgagtaagtattatttttgtttttaaggaagttgagatttaggaaatggaagttattttttagggtttatagtaagggtttggtgaggtttgtgtttaaattttgattatttgattttaggtttttttgttttttttgttttttaaaaatttaaatatttttatttgggatgattttagatagttagattttaattgttttttttttttttgagtatgttttattttaaaattatataaagataatttattttttaattggagttatggaattgttagatgttttggagatttttttagttatttttttgttggatttagatataggtttgaataattaggtttaaggagttgaattggagttgtttgtggttagaggtttttttttgggaatagtagtggtggtagtggttgtgttgagtttggtaatttgtttaagagtaggggatgtttaggttgtgtttgttttttttttatgaatggtttgttttgtgttttttttgtgttaagggttgttaggtattagatgtttattttaggaaattagaaaaataaatagtgtaaataaaataaaaattttatttaagaaatttgagatagatgttgttttttttattgtttttttatttttatgttgggtttggagagagtgggttagtatgttttttatggataagaggttttggggtatttaatttggatggaattttttttattttttttttgtttggtgttagggggtagaaggtaggggtggtgtttatttggtttagggaggaggatagggtagtttttgttgttggtattttttgtagagatgttttagttagaagtgattttatttttaggaatgtgtgttttgttttttgttgggtggtttttttttattttttattgtttttatagtggggtgtgttagatttatgggtagagttttggtttatttttagttttggatagtagaatgttttagtagtgtattgatggtgtgtgtgtggggatgtgtggaataggggatagtgattttgtgtgtgttatatgtagtgtggtttttagttgggtgtgtgaagggggtgtttatggttattgtggaagtgagtttagttggggttggagggtttaggtttattgtatgttatttagtagttttgggagtggggtttatttttttttttgtttttttttttttttggttttgggtagtttattggagttgtattttgggttattttttttggttttaaggaggttgttatttttgggaggtagatgttggtttttttatttttgttttttggagatttgtgttgaggtttgtttttttgtttggagggattggttaggaatttttgggtttttttggtggggtttttgttgtttagtagtgagtagagtgagtgggtattaagaggaggatgttgggtgaggttatggatatggttggggtaggttgggggtgttggaggtgaattttgtagttgtgtgattttgggtagtttgtttagttttgggttttgtttttttttttatgaaatggggtgggagtatttgtttgttggggttgtgggttgggtgaattggagttaaggtatagtttatagtttgttgttagatttttgtaagtagaagtgggtgtttttgtttagtgttttttggttttttttttaaggtttagttttgtttttattttttttatgaagtttttttggttattttaggagttatgatttatattttttttggagttttgtgttatatgtattttttatggtgttgttttttttggaggatgggtttaattaaaattggggtttatttgggggttttttttagtattagagaagtttaggtttagtagagatgggtattttgttaatattagttttgtgaaggatatattgtgtttattttgttgttagttgttgagtttggtgttttgtagttatggaatatgtgtataggtttgggttgttggatatgaaggttagatgggtagtttattttgtttttgttttgagtttttagaaataagttggttgtatttatttttatttggttatagtttaggagtggggttgtggaatggatggaaggaaggatgagtgggtgggtgggggggtgggtgggtgggtggatggatggatggatgatgggtggatgggttgatggatgggtggattaggtggataggtgaatggattggtgggtgggtgggtgggtgaagggttgaataggtgggttgggtggatgggtggatggatgtgtggaggggtggtggggtggatggggtttatgggtgaatggatggatggatgggtgaatggagtaaatgagtgggtggatggatggatggatgttgtaagagtttttttggagggttttagggaggaattggtatttttgattagtagttagtatggtgattagatatagggaggtgtttgggtttgtttgattttttattttattgttggtgggattgggttggttatgtgtttttgaagttttttgaagggtggttgtatggtattgtttaggggatatttttagagtgttgtgttttatagtaatagggtggttgtttgtgtttttagggttgttttttttggtagttttttgggtttgtttggtttagtattttagtaaatttttttgagttaggatttgtttgttatgagtttttttaataagtagttttaggttaaggtttgtgtgtgggtagagggagtgtatgttgtgggaggttgtattaatttgaggttttgtttttgtttttttttggggtaaaaggtaaaaatagtttgttttattttatttttaaatttagtttggttgtatttagttttgggagtgaagggggttgggttaggattgtttgtgagttgtagattttggtgtagggaaattttgatttataagatgggtggatatggaggaaggaggagattttgtttagtagagatatgtttgggtgtagtttagtttggagtttgatggatgtgggtttatttgtgtgtaatttttatttattgtgtggttatagggaagtgatattttgtggagatttagattttttatttgtaaaataggggtagtagggtttgggggaggatgtgtgtgaaggtttggtttagggtttttttagtagttagatagtagtggttgttatttttttagtgtttagggttatttgggggagtagggtttttgtttttagatgggttttgtttttggttttggaatttatagtaggagtaaaggtgaggatatttttggtgttaattatttatttggagggagagtgttagtggttttgtgtgatttttgttttttgtttttgtttttaggaggtatgtggatttttagtggttggttttggaggtttggtgattttagtggtttaggtaggtggtttgttttgttttggttttatttagtttatgggtgtgtttgtgttggggtttttttattttggtttgggatttgtttttttatttggtttttttggatgagtggggttatttgtttattttttagggagatgtagtttttgatggttttggatttaggtggtttttaggtttgttgatgttgttttgttggagatgatttttgtgggggtaggggtagttatttttaggtttagggagtaagtttgtgtgtgtgggatagaggagagaataggagatagatagggttggatgatttggtttgagatgttgaggggatagatgtgttatggataggtggttttggttgtgagttttttggtgttggtttagtatttgtgggttttttgtaattttgtaggatggaagatgttttaggatagagtagatatgtttggtgttatttaggaggaaataagtgggtttttggtagtggttattgtgttattttttgtgttttttttatgtgtttggaaattttttatattaattagtagggaagggaaatagatgtatttattagagttttggggttggttgtttaggatatgagttatagtttataggtttgaagggattttattaatattgggtgtagtttgggtaagggagtgggatagagaggttagggttttgtttttagtttttgttttttagggttgagtttgtgtgttattttttttttattgggtgtttttgattttttttgtttgattttagtgtggttatgttagtgtttttgtttttgggagtttatgttgtttttggttgttatttttagtggttaggttgggataggtgtttatttagtggtttttttatttggagaggatgatgggttatagtaatgaatggatttattttttttaggagatgaggagttttgagaagagtagagatggtgtggttatttgtgtatatgtgttgggggttaattgggtgttagatttttggttgttattatggtggtagataggtagggattgtgtttttatgaattagttattttagaggagataaagttattaaaggatatggatttggagttaaatttatataaatagagtgtttgtggattagggttgtttttagaataaggtgagatagttgttttgttaggataaggtgtttatgggggtaagggtatgtgtttatttggagttgttatttttatgttttagattagttttgtttaatagaattttttgtgatggtgggtttgttttatatatttgtattttgttattttgtatggtagttgtttagttgtttgggtttattgtatatttaaagtataaatgtttatgtttattttatttatttatttatttgtatagaattatttatttattttaaatggatttttatttatatttatgtgtggttagtggttatgaaattgaatagttttagattatattggtatttgagattttagaattttagatttaaagtttgtttttgattttgagtttgtttttgtggggatagtatagatgttttttaagtttgttttttagaggtggatgtagtgtttgtggattgtgtattattaggtttggatagtggagagggtggttttttatagggagtgggagtggaggggatgttgtgtttatattgagtgtatgtgaggttttttgtagtataggatgggattgtatgtgggaagaggggggtgatgttttggttggaggtttttgggtagttgtatgatttagtgttgtggttaagaggggttttgtttattgtagttatgttgggtattaattattggatagtttagttgttgttgtgtttttggggagtttttttttggttttgtatttgatttgtttttttattttttttttttttattggttagtttttggtggaatgggtggggagggttttttagtttttgtgggggttgtattttgggaatttggtattttgggttgtatggatatagttttttttggtggttgtttttttttgtttagattggttggttttgtgttgttagtatttggtagttatgattatagtttagtttggaagtttaaggtataatttgttgaattttaaagttgtaagttggtgatttgggtttgtgtgggattgtttgttgatatatggggttttttttttgtgggtttttgtgggttttggtttgagatattttttttttatttttttggtttttttttttttttttgttttttttttgttaagattttggtttaggtaggagtttatttttagatgttttagtatttttggtttttttatttgatattttttagatgattgtttgttattttatttttttagtttagtttttttgtagatttatatttggttaattttttatgtttgggatttttgttttttttagaaggatgaaggttttttttgaggttgtgtttgggattgggttagggatgatatttttggtaaaagtttaaatgatattatgattaatgttttggttagtttatatattttttttttttttaaaaaaaaaatggaatttttagagttataaaataaaaatgtaaagaataaggtaataaaatatttgtgtatttattattttgtttaagaagtgagatattgtaggtgtagttgtagttttgggtgattttttttattttagttttatttttgttgtggtgtttgtttttttggattgggatttggttttgggtaggtatatttgtgttgggtagtggtgtgtttgagaagtttaggtttttttttttttttttttgagatagagttttgttttattgtttaggttggagtgtagtggtattattttggtttattgtaatttttgttttttgggtttaagtgatttttttgttttagtttttttagtagttaggattataggtatttgttattatgtttggttaattttttttgtatttttagtagatatagggttttattatgttggttaggttggttttatatttttgattttaggtgatttatttgttttggttttttaaagtgttgggattataggtgtgagttattgtatttggtttggtttttttttgtatatggttattagtattgtgtgattgagtagtttaggtttgtttttttttgaatgttgttattagtattatatttttggtgttttattggagttagtggttgttttgtttgtgtttataatgtgatggtgtggagatttatttgtgtagatttatgaagttttggtttatttattttggtagttagtgagtgtttttttgtgtggggaggtagagtttgtttgttttgtggtttattggtgatattgttgaaggttttttttgttattagtgttgttgggaatgtgtgtttttttaggtggatttggttgggttgtggagatgtgttttttagtttttttagatgttattattatgtttttttgagtggttttttggtaggtttttttatgtttgtttattttttgtgttttaggtagttgtttttttgattgagtgtttagtggatttttgttttgttttttatggtgtatggagtattttattttagtggtgtttgagtttttttttttttggtttttagattttggttgggatttttggagttaatttttttgtttgatattttgtgttgttaggttttgtttttttattttttaatatttttggggtgtgtggttttttttttagtgtttttattattttttttgttttaggttgaattgtgttttttataaatttatgtttattaaaaattttagaatgtgatttgggagttggagatggggtttttgtagatgtaagtagttaaggattttgagatgaggttattttggattagggtgggttttaaatttaataattggtgtttttaaaagaagtagagaggttatagatatattggggagagttatgtgaaggtaggagtagatgatggagtgatgtagttttaggttagggagtgtttgggaagaggtaaggaaggattttttttttattttattttagagtttttttagggagtgtggttttgttgatattttgattttggatttttggtttttagtatgggagagaatttgtttttatttttttaagttttatagttgtggtttattatggtagttataggatattgatgtattttttatttggttgttgtggatggatgattttgtttgtaggaagttttttttaagtattgtaggtgtttttgtttttataggggatgtttgtataagtaggtgtgaaaaaagggttttgtgggggtaaggtttgggttggtgtttgttgtttttttttattttatgttagtttttatgttttttttggtaggagtgtttggttttatttggtgaattagagttaaatttttttgataattggttgttatttatttaattgttattatttttaggagatagaaaatgttagaagggtggggtttgtgtagtgtttttttgttatttttttagggtattgtgttatgttgttttaatgtatagagtagttgtttaaagtgtgttggatgaataggtgttttatgtttagttatgtagataaaagtgtgttatgtggagggagttggttgtggaagagattattagtattttggttgtttgaggattttgtttttgggtttttgtaggtatttttagtttattatttttttttttatttatagttatttattttttttttatttttttgatattagttttgttatttatttaggtttgtaagtaggaaattttagagttgattttgatttttgtttttttagtatttttaggttttaataggttgttaagattttattaatttgttttttgtatattgatttttggataggttgttttggttatggttatgttttggttgggtttttattatttttttttggattagtaggtgttattttttttatttttgttttgttgtggtttttttttttttatggttaatatttagaggatgattattatttttttttttgtgtgttggggattgggtgataggatttttttatttgattatttttattagatttgggttgggtttttttatttatagagtttttagtttttgtttttaaagttttgagggtggatttgtgttgttgtttagtttggttttgatattgttttttagtttggagttttttgtttttgtgtttttggttttgagtgtttgggttttttttggatgggttgttatttgttttttggaaagtagggtttttatgtttttggattttttagttgatttagtgattttgggttattttgttatattttttttattagtttggttttggttatttttgtgttttttatagttttggattagagttatggtgggatgtttttttggtgtgtggtaggtagttaggaaatattgttggattgattttgataggagatgtttgggagaattgtttaaaaaattagtttaaaatgtaaatattggtttttttttgtgttggttaaagagtagtatttttttgtttgttttttgggtaagaaattgatggtgaatgtaatgtttttagggaggagaagaaggtgataaaaagggtttgtataatggggtatatgttaggtatttgtgattatttaagtttaaattataatataaatgtgaaattttttgttttggtagtttttttatattgtaagtgtttattgttatatgtggttgttatattgattatggtagatatagaatattgatattattgtggagagttttatgggggggtgttggtttagattatttttatgttggatttataaatttattgtttatttagtgaatggttattgggtatttattgagtaagtaggatgaaagatatttgtttttgggggagttttttgttggttgtagagaagtttaaatttaggggatttggggtaaattttgtaagggtttttggtttttgtatttttagattttttttgttttgtaggggtagttgggggttttttttaggaatggagtgttagttttagtttttgttaggttatagtttagatggttggttgagtatgagtatgtgagagtggaattgggtttaattgggttgtttttttttgttgttttggtttttttttatgttgatttggaaggatttttaaagtaataggtttgtttaggtggtttgtattagtaaattttgtagtggttttaagggtagagatagttggattgtatttatttaggaatagttaaagtttgaggtataataaaaagtggagaaagattttagagaggaatgtagttggttttagtttgggaatttgttttgtttgggaggttgtaggtgggttaggttggggttagtttggagggttttggttggttttgttggtaggtatagtagtagggttagtaggagggagtttaggatggagtttttttatttttaatttagggaagtaaattttagtggttgagtttgaggatgagtaggaaatgaatggaaaagtttttttttttttttttttttttttaggtagggtttttttttgttttttaggttggagtgtagtggtataattatagtttattgtagttttaatttgttaggtttaagggatttttttgttttagttttttaagtagttgggattatagttgtgtgttattatgattggttaatttttaaaagaaatgtttttaggttaggtatggtgatttatgtttgtaattttagtatttttggagttgaggtgggaggattatttgagtttaggtgttttagattagtttgggtaatatgatgagattttgttttgattaaaaatataaaaagttagttgggtgtggtggtatagttttgtagttttagttatttgggaagttgaggttgtagtgagttgtgattatgttattgttttttagtttgggtaaagggagtaaggttttgttttaaaaaaaaaaattttttttttttttgaggtggagttttgttttgttgtttaggttggagtgtagtggtatgattttggtttattgtaatttttgttttttaggtttaagtgatttttttgttttagttttttaagtagttgggattataggtatgagttattgtgtttggattttttttttttttttttttttttgtagagatgggatttttttatgttgtttaggttggttttgaatttttggttttaagtgatttttttattttggttttttaaagtgttggaattataggtgtgagttattatatttagtaggaaaagttattttttaaagtgagaggttgtgtgttttttatagtttggtgtttattagtatggaggatttattggaatgtgtgttaggtgaggggatatggaagatggtagtaaatttgagtttagagtattagaaagtatgtttttagttaaagatgtgttttttttatttttgtgtagtatttttttttagtgtgtatttttggagtaaggtggggttgattttatgaagatttttttttgaaggtttttgttgtttatattagtgttatttggattgtttgtttttttttttggatggttggattagttttagggttttttggtttggtgtggggagtatagtttattttggggaatgtttggtatgtgttttttttttattgggtattaggggatgaagttgtgttttgtggaaggggatagaggtgttggtgtttaggatggtgtatttggggtggttgaattggatttggtttttattgggtttttgtggagtttagattgttgtgagaaggggtggggaaaggtaggtgatttgtattttttatttttgttttatatgggaataggggtttattttgtatatatatttagtttggagtatgaatttttatgaagaggaaaatttttattaggttttgatgttaggattgtttgtgagggttgggttgtgttttggggtaaggataggagtggagggggtaattagggaaggttttttaatggaggaggtatttgatagtattttgaaaaagaagtagtttttaggttaagttagagattgaagaatgattatttaattttttttttttttttttgagatggaattttgtgttgttgtttaggttggagtgtagtggtgtgatttaggtttattgtaatttttattttttaggtttaagtaatttttttgttttagttttttgaatagttgggattataggtatgtgttattatgtttagttaatttttgtatttttagtagagatggggttttattatgttggttaggttggtttggaatttttgattttgtgatttatttgttttggttttttaaagtgttgggattataggtatgagttattgtatttggttatgattatttaatttttttttataagatgttttttggttgatgtaaagtaggttgagtgagtgtgatattttttttttgtttgtgggttttggtttttttagagtttggttagtgttattggagataaagtggtttttgttttttttttttgttttgttaggtttagtttgtgttgttgagttttattttgtaattaagaggagttgtgaattagtgatgttgatgttgtagaaaagtggttaggggtttatggggggtgaaggatagggatgttgttttgagaattgtttggaaggggtttttgggtaatagtgtttattttagggtgtgggtaggttggggtggttgggagttgggtttataggttggtataattagagttttttaaagttgtgggtttgagggttttgtttttttgggatagtaatttttggtttaatttgggaaaaggtgggttaaattaagtttggtttttttattgtaggattatttagtgtgtttagtatgtaaatgtgtttttgaatttaagataggattatagaaatttttttagtgtttttttggagggagggattgtgggggatttattgtaggggtttgggtttgtattggtttggtgaagtgtttttttagtgtttatattatgtgtggtgagaggttggtttttgttttttttattttttgttggttttattttattatttttgtatttgttttttagttggtttatgattaatttttgtttttttagagttaattggtgttgttaggttttttattttaagtgattttttgtttgggttaaaatgtttggatttttaggtatggaggggagatggattttaggttaaattatgttgggtaaaattgagggttaaggttgtgtttagtaagtgttttagttttggttgttaaatttatagtgtgtatagtgtgtaggaggtggttgggtgaatgaatttagttatagtttggttttttatttggggttgtttttaagtttttattgttagttaggttgggttagagttttgtggggtttttttgggtttttttgttttatagtaggagtttgtatggagagttttgagtgaggttaatgggtttttttttttttttttttttttttttttaatttgagatagggttttattttttttatttagttagggtgtagtagtgtaattatagtttatagtagttttgaatttttggttttaagtaatttttttgttgtagttttttaaagtgttgagattataggtatgtgttattttgtttagttggggtttttgttttttatttttttttttgtttttaaatttaatataaagaaagatattatatttataattagaaaaattaataaggaatattattttaaaattggaaaagggattaaagaaataaattaagaaatttttgtgatttttgtttattggagttagtggttgttagtggttggtttaatataatgttttaggaagaaatagaataatagaaagtaattttagtgagttgagttttggttttgtttgtggtgttgtattagttttttgtagttgttgtaatgagtggttataagttggttgggttataataatgtttagttatttttttatagttttgtaggttatatatttgagattagggttattaggttgaaattagggtgtttattgggtatagttttttggaggttttagggtaggggtttttagttttgtgtgttttattaggaattggtttgtatagtaggaggtgagtgattggtaagtgagtgaagttttatttgtatttatagttattttttattgtttgtattattgtttaagttttgttttttgtttgattagttatggtattggatttttataggagagtgaattgtattgtgaatggtatatgtgagggatttaggttgtgtgttttttatgagaatttgatgtttgatgatttgttattgttttttattattattagatgggattgtttggttgtaggaaaataagtttagggttttaattgattttatattatggtgagttgtataattattttattatatattataataataatagaaataaagtgtataattaatataatgtgtttgtggttgggtgtagtggtttatatttgtaattttagagtgaaattttgttttaaaaaataaaaaataaaggttaggtatagtggtttatgtttgtaattttagtattttgggaggttaaggttggtggattatgaggttaggagtttaagattagtttggttaatatggtgaaattttgtttttattaaaaatataaaaattagttggatatggtggtaggtgtttgtagttttagttttttgggaggttgaggtagaagaattgtttgaatttaggtggtggaggttgtagtgaattgagatagtgttattgtattttagtttgggtggtagagtgagattttgttttaataaaataaaataaaataaaataataaatataatatatttgaattattttaaaattatttttttattttttggtttgtggaaaaattgttttttttgaaattgattttaggtgttaaaaaggttgggggttattgtttttattgtttgtttttttgagtttttggtggttgtgggtgttttttggtttgtggttgtatggtttttatttttaatattagtatttatagatttttttgggttttatttttatttggttatttttgtttgtgttaaatttttttttgtttttgttttgtatgagtattgagattgtttttagggattatttagattatttagggtgtttttgttatagtaagatttgtaattgaattatagatgtaaaaatttttgttttaaataaggttttatttgtaggtttagggattaggatatgttatttttggggttattatttagtttttttttgtgattatgatttttttttttttttttagttttttattttggttgagatgttgtttttattttttttattgtttggttgtttgtggggttgttttttaggttttttgggaggaggtggttgtttgatgttttttagaaggttgggaatggttttttttattttttaggaagatgttttttttgttaaggagattgtatttggggttttattttaggtagagagtggatgggattgtggtttgaagtggtattttagggtttttggttttgttatttagttgagggttgtgtatgggttttatttggttataggtaatttatttggttttgtggggtagggattgtaaatttagaggtttgtggggtgtgttgaggtagaggggtgtaaatattgtaaatttgttgggggttttggggagtagtatagattgaaaagtgttttgtttgaagagtagaattgttttatattagttttgtgtggttaggtaggaaggtttttgtggtgtggttatgtgtttttttttttttaatagaagttgatagtttggagtttttagagagattgtttgagtttttagttttggtataaatatatattttttttaaataggtttgggttaatagaattagtttttgtgttttgggtttgaatgaatttttgaggtgaagtttaaagatagagaggatgtttttgatttttattttagggatttatattgtaaatttttatttgttttgttgagtttttggttttagtatggattttgattatgtgttggtggggattttttaggtaagtaagtagtttttgaggattttggatgaatagtggggaatagtattgattttttagtggggttttgagtttttggagaggaagatttgtttttttttaggggatggttagagatttattgatttatgtgtgtgtggtaggaattttttaggaagtttttgttttgtttgttttttttgtttgggtggggatggtaattgtttttgttattgtagattaatgggatggaggggggtgattttttagggttttttttgggtaggtgttttggaatttttttttagtatgttggtttggggtatggttgttttttttgtttagttatgttggggtatagggtgaagaagggttggggttagtttaggatagaggaaggtgaggtaggtatgtaggaattgggttttttaaatttttaagtttaaggaaattgtagtattgtgggatagggaaaatgaaagattttggaagttgttaggaatttgattttgtgagttggtttttaagagtttaagttaagtatttttaagtggatattaaaaaggagtagtaagttttggggtggtgggggttggaggaggtggagagaggaggttgttggaagttgtatttgggatttttgtagttattgattagattgggtggttgggattttgggatttttgtaggtagatttggtggtttgttggattttttggggtttattttgggtttttttttttgttttttatttttggattttttttttttgttttttttttttttttgttttgaagagataatgttattttagtttggagtataaatatatgattagtatatggaaatgtggtaatttggatgtatttgtgattgtaatagattgaagaaattagattagataaagagtgtttttagaggaggaggaggaggaggaggaggttgagagagggagggtgatgggggtgagaaaggggaggttgtttttgagtgggatgttgggatttttgttgttgttaaatatatttgtaggaatggagagggattggattttaggtatgtagatagttttttttttattggttgttttttattgttttggatttggggttttatttatgtttgggggaataagtatgtaaagggtgtttttgtttattttttatagaaatattttttttttttttgatggttttaagtttgtgggatgaattttgttttagaagttaagtttttttgagtttggtttttatttaaatttggttttttttttttttggttattttttttttattttttagtgtgttatttttgtatgttatggttattgttaatgttgaggttgttggtgttgaaattttgggagggtgtgggggatttgtttttttggtttgggtttggggtggtggtgtttggatttggttggtggttggtttgtttattgtgtggtttgttttttgtttttagttaaagtttgtttttaaggttgttttggttttttatttaaaatagtatttttgtgtttttttggtagttgattatagagggggaagtttttggtgtttagaggagtttggtgtgtgtgtgtatgtgtgtgtgtatgtgtgtgtgtgtgtttatttatgttggtagtttttttgttgtaggtatagatttattagggtgtgaataggtaaatgaagagaaagggggtttttttgtttttagtttattttagttttttaggtttttttttttaggtttagtttttttggtttttttatttatatgtggtgttgtggttgttattttatgtggttagtgttgttattggtaattagtagtgatgatagtttttgttgtttatgttgttttttgagtttagtgttgggagatatggggtggttgagttaagttttaggttttgggtattttgaagtgatttatgggttatggagtgggaggttgttaagagtgttaatttttatgtgttttgggttttggtttgttggttgttattatgtgtgtgttggggggtttttgagaggtttgagagagggaggtttattttggtggtttttttttaggatgtgtggttttttttattattgtttttagggttatatttttttttttttttttttttgagatggagtttggttttgttgtttaggttggagtgtagtggtgtgattttagtttattgtaagttttgtttttttagtttatgttatttttttgttttagttttttaagtagttgggattataggtgtttgttatatttttttgtatttttagtagagatggggttttattgtgttaattaggatggttttgattttttgattttgtgatttgtttgttttagttttttaaagtgttgggattataggtgtgagttatggtgtttggttttagggttatattttgattgttatgttgggattggtggagtgggtgtgtgttgtgttgttgagtatatttagttgggtatagtaggtggattttaggagggggttaggggagatggtagaaggtttgggtggtagtgaaattgtattttatttgtttgagtttgggggtttaggtttgttgggatgggtgggtgtggagtttagtgttttgttttttgtttagtaggagttgtagggtagggagtgttgagagggatttttgttaggtttgtatagtggagttgtttttggagtgattattttattaggtagtttgggtagattatagtgggttttttgttttttgggttattagttttaggaggatgttattttatttgtttggttggtaggggttttggggagttttgggtttggtttttattttatagatgatttagttgaggtttagatgggtgattagtaggggatttgagagttgagtagagaggtgtgggtttgggggtggtgttttttggggagttggaagtgatggtatttttttaggtttataaaatatgggttttttatgaattgaataaaatattttttgaaagtagttagtgttgtgttttagagattattttgatttttgttgtttttggttgaggatagtatagttagggatgaagtggggatttttttttgggttgtgttttgatgaaagatgttttttataaaattttatttggatgtgtttttatgtaagaaaatgtatatttttagaaatttagttgtaaattggttgttttttgaatgaatatgatagttttggagttgttttttttaatgaggtttttgttttgggtaaattttagtgttggtttttaattgttattgaatttttgtatagtttttggggaagtgattttttttttgtttttgttgggtggttttgagtaagttatttggtagttttgggttgtagttttgttatttgtaaggtgaggggtgggagtggtatggtttttaggtagtgtttttattttttgtgggtttttgtgtgtgttttgagttttgtgggtgtttttttttttattgaggggttttttttttttgtagggtatggtttatgttgtgttgttaggttgtaagttattgtgagagttgttttgatttttaagtatgttttggtttgaggaggagttatggggaggatgttgtgtttgtgtgatagaggtttgtttggtagatgttggtttgttgatttttagatgtggttgtgggtgttttatgttttattgggttggtgtgtgaggtgtgtttagtttaggttgttttatagttgtttaggaagggtttgtgggagggggtggttttattttggtgagtttatggtggtttgttagttttagggaaggtttaggagttttaagatttgtttttttgttttttttttggtagtgtttggttttggtttggtttgtgaatgggggtttgggtatttttttgttttttttgggggttgtggtttttttttgggaaggtgttggagggtttgttagtagggttggtatgagttatggagtggtgattggttgttgaggtatggaaggttattttttttagttaagggttggagttttttttttgttttggaatggttttgtggtttttataaattaagtagttttattttgttttaagagtttgtattttagtagggagagagtttttaagaagggaattttttattggggagttttgttgggttgggaggttaggaataggttatgagggagggttgtaggtaggggaagtggttgtttgtgtatggttatgaatgtaggtttggggttttggagggggtttggttatgttgttgttggatgtttgtttttattagggtttatttgatgtagtatggtatagggtaaagtttagttttttttatggggtttttgggttattagtgggtggggaattgaggttttttggagggtggtgttttagtttttattttttttttttgttttttgttgtgttgtttttgatggtttttgttattttttgggagtttttatttttggatgtttggtgtttgtttggttttaatttttttagttttgtttttttatttttgaggtgagaggtttggtttgatgtgttttgtatttgttttttgtttagttttgtgggaattttggtttttgtagtggttttttggggttgttattattaagtgttataaattgggtggtttaaaatattagatatttttttttttgttgttttggaggttagaagtttgaaattatggtattagtaggtttggttttttttggaggttttgagggggagtttgttttttgtttttggtagtttttggtggtttttgaaatttttggtgttttttggtttgtggttatattatttgatttttgtttttgttgttatggggtttttttttgtgttttaaatttttttttgtttgttttttatatggatagttttttttggatttagggtttattgggtaatttaaaatggttttattttaagatttttaattttataatgtttgtaaagattttttttttaaataggttatgtttataggttttggggtggatgtaaattttaggggttattttttatttttttgttgtttttgtgtgtttggatgtatagtatggttttatgttttagattttttgttggatttttttggttttttggggtggtttttggttttttttatttgtttttgtgtttttggtgaggtgttggggttgggtttagtttttgtaggaattttggggatagtatggagttggtaattttttattaggtgtttttttatttgtttagagtttatggttgtgaggggtttttttttgtggttttgatttgtaattttttagtggttagtgatgttgagtatttttttgtgtttattgtttatttgtatatatttttgtagaaatgtttgtttaagttttttatttgtgtttgatttggatgattgttgttgttgagtgttaggagatttgtagattaatatttagatattaattttatatttgatttatgatttgttgttattttatggattgttttttttttatgttgttagtgttttttgatatgtaatttttttttttttttttgagatggagtttgattttgttgtttaggttggagtgtagtggtatgattttggtttattgtaatttttgtttttttggttttagtgatttttttgttttagttttttgagtagttgggattataggtatttgttattatatttagttaatttttgtatttttagtagagatggggttttattgtgttgattaagttggttttgaatttttgattttaagtaatttatttgttttggttttttaaagtgttggagttataggtgtgagttattgtatttaggttgatatgtaaatattttaaatttttatgatgttttattttatttatttgtttttttgttgtttgtgtttttggtgttatatttaagaaattattgttaaatgtaatgttaggaagttttttttttgtgtttttttttaagagttttgtggttttagtttttgagtttaggtttttgatgtaagttgagttgatttttgtatgtggtgtaagggttggtttagttttatgttttgggtttttgatttattttttttttttttttatgtttagttggttttgttgggtggtggggaggagtggggaagttttgggttgggtttgtatttgattatttttttttaggttagttagggagttttagtttttgtttaggatttggttggatgtgttttttattgggaaagtttgggttgtttttttaggttgatggtagggttagtttggggtgttttgaggtttgttttgtggatatgttttttgttttaggtggtgtggttgtttggtttgtgtgtgagattagttgtttgtgttttaggttatggaggttgagtgtttttagtttgtttttttgtttggttttttttttggggaagtttttgtagtttattttttgtttttgtttttgttatttgtgtttttgtttgttttttgtttggaggtggttatttttggggttattttttatgatttggatataagtttttattttgaagttattatttaaatttttgtgttttaaattttttttatttattatatgggtttttattgtgattaatttagtagttgatgaagttttttttggggtttttttagtaatggggagttggtttttttggaggtttggtttttttttaagtggaagtggggtgtgagggtgttagtttttttttgttgtttggtgttttaggttggtttgttatttttggaagtatttgttatttttatatagtattttatatttatttttttgttttttatttttttttttaaggggttatttttgtttttttttttatttaattttatttatgtggtttgtttagtaatttttgatttttaatatgataaaataaattttttttgttggttatttatttatttatttagtattgggtgttttttgtggatttggtgttggggttttgtggaggataaagttagatatagtttttgtttttatgggattgtataagtgtaagattatattagtaaatgtgaaatataggaagtgataggtgtgataaaggggattagtggtaggatagaatttgtggtttgtaggattaggttaggagggttgttttggggggatatttttgggttgagtgtagaaggatgaggggagtaaattaggtttaaatttagtaggtagaggtgattgttgtaggtaattggtaatgtgtttaaaggttttggggtgtggggggttgaggttggtagtatggtaggaagtaagattggggttgaaagagattgattgttatgttgtgaaatatatatttggtttttatttttattttttggtatataatttttaaaatttttggaatttttaaagtgatgtttttttggatgtttatgattgatagattagttggtagttttaggatggtttttagggaagattaggtagaattataaggtttagtattattttgtaatttttaggtaggggagaggggttgaaggttaagtagattattagtggttaatgattgaattaattatgtttttgtaatgaggtttttgtgaatatttagaaggatggggttttgggagtttttggatggatgagtatgtggaggtttttggagggtggagtgtttggggagtatatggaagttttgtgttttttttttatattttgttttatatatttttttttttgtattttttgtaatattttttataataaattagtaaattttatgagttttaggaatatgtgtaaaagaaaaaaaaaagaataaattatagttgttgtagtaagttaattttattagtattggtttttatttgttgattttatttttggtaatgttttttttttttgggtttttgggatttttttggttttattattttttttgtagtggttttgttggttgttgtttttaggttagtttatttttatttggtttgtttttattaggggttgaggtttttttgtttattttagttttttggtttgttttttgttttgggtatttttttattttgaatggttagagtttttgaagttgtttgttgtgtgtttttgtttggttttatgtattttgtatggtgttttttagggttttttattggtaagggtattggtatagattttggggttgttttggtttaagtttattttgatttggagtttgagggtttttgagggggttttgaaggttagggtaggtaaggttggtatgttttgggtagtgggggttgggtatgggaggggattgtgggtggggagattttttttaattagtggtttatgtttggagattgatttgggttttaggttatgttttgaaattgggatagagagtggtgtagattttagtttggagattttttttgtttgtggatgtttttatatttttatttgtggagttatttttttttttttttttttaaatggggaaattttgatttgaatattgaataaataatatatttttgaaattagtgaagaggtattggttttgaaattttgttatgaaagtttgaaaatgttttttggattgatttgttggaatagatgggtgtgatggggttgtggggttttaggtggtaggaggtgtttttgtgtttagggtattttgatgtttagagtttttttgtgtttagtgtgtttttgtatttagggtatttttatgtttagggtgtttttgtgtttagtgtgtttttgtatttagggtatttttatgtttagggtttttttgtgtttagggtgtttttgtatttagagtatttttatgtttagggtgtttttgtatttagggtgtttttgtttttagggtgttttgtgtttagggtgtttttgtgtttagtgtgtttttgtatttagggtgtttttatgtttagggtgtttttatgtttaggtattgtttttttttatttttttaatttttttttattaataggtgttagttgtgaaatgtttgttgtgtgtgttttttggttgagtttattttgtgtttttaagtttttgttagatataggtaggttgttttagtttttttggtaaatgttttgttgttgttgtttgatatggggttttattttgttatttaggttggagtgtagtggtgttattttgttttattgtaatttttgttttttaggtttaagtgatttttttgttttagttttttaaatagttgggatgataggtgtttgttattatgtttggttaatttttgtatttttagtagagatggggttttattatgttggttaggttggttttgattttttgattttaagtgatttatttagtttggttttttaaagtgttgggattataggtatgagttattgtgtttggtttgtttggtgaatgtttattgaggtttattatgtgtagttttttttttaggtgtttggtttgtaatgaggagtaataaagatatagttgttggttgtttgttatttaatagttggaattgagaggtagtttataaatgagtaaatttataggtggttttagatgaggattgtgaagaagttaagaataggttgttgggggtgtatatttgtgtgtgtggtgaggggattaatggaagttttttttgagtggtgatattgagttgaagttgtaatgattagaaggatttagttaggttaaaatttaagggaagagtaatttggtaaaggaaatagtaggtgtgaaggtttgaggttggagtttggggaaggtgggagtggttggagtgtgtttttagagatgggttatggtgatattaatgtgataggtagggttaggttgtgttgggttttggaggttttggtgagggtttgattttatttttattatggtgggattttagtgttttgtggttgttgagaatggttaggggtaggtagggaggtttgttagggaggaggttgttgtaggttttgtagttggagagggaggattaggatttttttagagaggaagttggagagggaggatttttttgattgttggatggatttatttgtttggttgtttttgttagtatttagtagaggttattggatgttgataggtggttggttttgtttagttttgtattgttttgtgttgttttggtggttgttggttttaggaggagtgtttttggtgtttgagtttagtggttttggttgtggtttggtatatttggttgtgggtgaggttaaggtggtttggattttgggaaggttgggtatttggtagttttaaggtaggagttggggtgttggaggaggaagtatgtttattttttgtttttttttgttttgtgggatgttgagtttttgggtagggatatggtgagttttggtgtgatgtatttaatatttgttggtgtttttatttttaagtaggaattttggtgtttggtgtttgaggattgttgtttattgttttattattttttaggtttttttttagtttttgatttggggtaaggtttagatatttagaatatttttggttggtttttggagttggggtgaggtagaattttttttttatatttatagtattagttaaggttttggggtttggatattatttttgggaggggtgagtaggataagtgaggtttttagatttggggtggttttggattggttaggtaggtgggtgggggttgtagtttatgtttttgttttaggtaatatagttgagttgtagtttttgttttatttttagttggggttttttgtgtttattttttgtttttttttttttttttggaatggggggtggatattttaagattagttttttagttattttttttgttttttgtttttttttttttgggatagatttttgtgattgttgggtgtttttgatgttttgttttttttgtgttttgtgttgtgggtgagagagggttttggggggattttttttttttggagtatttgttgttttgggtgtttttgggggtgggtttttattttatattgtggagttggtgtaggaaggaaggtgttgggagttagttttaatttatgtgttggttgtggtttttaaggtgtggatggtaggaggtggtgagatagggatttattgattatgggattgatatttttttatgttgatgtgggttttgagttataattttattagtttttgagttttggtgttgtttttggtgatggtgtggatttagttaggtttttgggtagttttttttggattttttttttgtttttttttgggtagtgtttttgtttatttggaaaggatgggtaggatttggagataatagggatttaaagaagttgggagtgggggtatttgtgtagtttattttgtagaatagataatttggttaaagtttaaagtttgttgttaggagttttgtttgttttttagagagtatatggtttgattattatggggattgggggagaggtataggtatgtttgtttggtagtagaagggaattttgggtttgggtttttttattttgtggtgttgtttttttttagagttgtattgttttttttattgtttttgtttggttttagtgtttatgtggtttgtggtttttagtttgggtttggttttttgtaatttattttgtttagttttatatagtttgtttttttagttgggaattggagtttatttggagttttaggtagtagatttgatgtagtgatgtagggttgttagttatgttagtaggttttgttgtttatagagggatgggtattgttgttgataataattaaagaattatggttttaggttgggtatagtggtttatatttgtaattttagaattttgggaggttgaggtaggagaattaattgaatttaggagttttagattaggttgggtaatatagtaaggttttgtttttataaaaaataaaaaataataataataataaaaattatagttttagaatgattgattttagtatgtttataaagttaagggtttttagtgttttgggtttatgttattgtgttagagggagagaggaagaggttggggtgatgggtattggggtttatgttttttttggaatgggtggttttggattgtgtttgtgtgatatgtttgttgagtgggggtggtgtttattgaggattggatgttgaggtgtgggtggggggaggttatgaagtattgggtattttttgtgtattagtgttttgagattgtagagaggggatttgtttagtttgggtagggaggtgggtggtagtgaggaaggggagaggaatttgggtgtagaaagttttttttttagtaggtggtgttgtaagtttttgagagtttagtttttgtggggtttgtatttttattgaatttgtgggtagaggttgtttgggtgtagtttttgttaattgtgattgtttattgtgggtgaggggaagtggagtgtagagaatgtattggagggtagatgattagtttttgtataggtatgggggtgtttttttttttgtataggtatggggggtttgagtttttggggtttttgttttaattgggtggggaaagggagggttggaagttgagttagggggaaagggggtggttttttgttattttttttattttattttttttatttttggttgataggttttaattttttttatatttttttaattttttgttgtaaaattttttaaatatagaaaagatgaaagagggttgagtgtggtggtttatgattgtaattttagtattttgggaggttgaggtaggaggattatttgagtttaggagtttaagattagtttgggtaatatagtgagattttatttttataaaggatataaaaaattagttaggtatggtggtgtaggtttggagttttagttatttggaaggttgaggtgagaggattgtttgaatttgggaggttgaggttgtagtgagttgggattgtgttaatgtattttagtttgggtgatagaataaaattttgttttaaaaataaaataaaataaaattataaaaaagaaattatgaaagattttaaagtaaatatttatgtatttattatttagattttatagtaattattttgttgtttgttttattataaatttttttggttattagtatttatgttggttttgatgtatttaaaataagttgtagaaattagtatataatattttgttaatattttagtttgtattttattaattagagtttggtatttgtttgtgattatttttgtttttttttgaagtaaaatgtatatattttgagatgtataggtgtgaaatgttttgttttttgaattttaataaaggtatttatgtgtattttagtttgattagaatatagaatattattattattttagtaagttttttatgtttttttaggtgtattatagtttttattttttttagggtaattataattgtgttttttttttattatgaaataattttgttagtttgagtgttttttagagttatttatgttgttgtaggtgttagtgatttgttttgttttattgttgagtaatgtttattgtgtgaatattttgtgggtttttagttatttttttgttgaaagatttttggttgtttttatttggaggtttttatgagtaaatttgttatgttggttttttttgtataagtttttttgtgtatatgggtgtttatttattttgtagaaatatttagagtaggtatagggtaggtatatatttagttttataagaaattgttagatttttttttaaagtggtttttttattttatatttttattagtaatggatatgagttttagttgttttatattttggttaatatttggtgttgttattttgtgaaattttagttattttggtgggtgtgtagtggtattattttattatggttttaatttgttttggtttgatgattaatgtggttgagtatatttttatgattggttttttatatattttttttttgtgaaatgtttttttaaatttgttgtttattttaaaattgggttgtttgatttttttttttggatattgattttttgttagatatgtgttttataaatattttattttagtttgtggtttgtttgtttattttttttttttttttaagaataaggttttgttgtattgtttaagtaggtttgaaatttttgggtttaagttgtttttttgtttttgtttttttaagagttggttttataggtatgagttattatgtttggtttgtttatttttttagtggtattttttaataagtaaaagtgtgttattttaatttttatgaagtttaatttaataaatttttttttttgtggttttttttttgtgttttttgtaagaaatttttgtttattttgttaaattgtaaagatatttatgtttttttttagaaggtttagagttatatagtttttatgaattaatttttgtatatggtgtgaggtagagggttagggtttattttgttgttgttttatgtgtttatttagttgttttaaattttatttttttttaaagtttttattttgtatttttttggtgatttatgaggttgtataattttttaagatttttgttggttatttatgtatttttttttgtaaaattatttgtttatgttttatttttttttaaaattatgttgttttaagattgagtgatttttgaagtttttattttataatgtttgaaagaatgaatattttgttttttagttataggtttttgttttttgttttgtagttgtatagtggggtaagatttgggttttgttttgttgttgttttgttgtttttttatttgattgtttttttatgggttttatttaaaaaaaaaattggttgggtatagtggtttatgtttgtaattttagtattttgggaggttgaggtgggtagattatgaggttaggagattaagattattttggttaatatggtgaaattttatttttattaaaaatataaaaaattagttgggtgtggtggtgggtgtttgtagttttagataattgggaggttgaggtaggaaaatggtgtgaatttgggaggtggagtttgtagtgagttgagattgtattattgtattttagtttaggtgatagagtaagattttgttttaaaaaaaaaaaaaaaaaaaaatgttgttttatatgttttttatatattttggatataagttttttattagatatatgtattataagtttttttttttatattgtttttttttttttggtttttttaatgatgttatttaatgagtaagagtattttgtttttataaagtttaatttattaattttttttagttttgatttatgatttttgtgatttatggaggaaatttttgtttatattaaggttaaaagaagtttttttattttttagaaattttatagttgtatattttatgattttttttattttttaattttttaaatttttatattttttaatttattatagttgttaggatgttgtatgatttattttaaattagtttttgtatttggtttgaggttagggttaatttttgtttttttatatttatatttagttttagtattgtttgttgaaaagatatattttattttattgaattatttgatatttttgttaaaaattattgattgtatatgtggttttatattagtatatgtatgtatatatatgtaggttttgtgttgattgtatgtgtggttttatattagtatatgtatgtatatatatattggttttatgttgattgtatatgtggttttgtattagtatatatatattagttttatattgattgtatatgtggttttgtattagtatatgtatatatatatatgtaggttttatgttgattgtatatgtggttttatattagtatatgtatatttatatatgtaggttttgtgttgattgtatatgtggttttgtattagtatatgtatatatatatatataggttttgtgttgattgtatatgtggttttgtattagtatatgtatatatatatatgtaggttttatgttgattgtatatgtggttttgtattagtatatgtatatatatatatataggttttgtgttgattgtatatgtggttttgtattagtatatgtatatatatatatgtaggttttatgttgattgtatatgtggttttgtattagtatatgtatatatatatatgtaggttttatgttgattgtatatgtagttttatattagtatatgtatatatatatatgtaggttttatgttgattgtatatgtagttttatattagtatatgtatatatatatatgtaggttttatgttgattgtatatgtggttttgtattagtatatgtatatatatatatgtaggttttatgttgattgtatatgtggttttgtattagtatatgtatatatatatatgtaggttttatgttgattgtatatgtggttttgtattagtatatgtatatatatatatgtaggttttatgttgattgtatatgtggttttgtattagtatatgtatatatatatatgtaggttttatgttgattgtatatatatatgtggttttgtattagtatatgtatatatatatatgtaggttttgtgttgattgtatatgtggttttgtattagtatatgtatatatatatatgtaggttttatgttgattgtatatgtggttttatattagtatatgtattgtatatatgtaggttttatgttgattgtatatgtggttttatattagtatatgtattgtatatatgtaggttttgtgttgagatattattgtgtttttttgatattttgtttatttttttgttgatgttatattttgattaatgtggttttatagtaagttttaatataaagttttttaaatatttaaaatattattttgaatattttaggttttttgagtttttttataaatttaagaagtagtttgttgatgtttataaaaatgtagtgtgaattttggttgagattgtgttgaatttgtagattaattaaggaagaattggtattttaataatattgagttttttgtatagatggtatatttttgttttaaaggtttttttgtattttttttatttttttattgaaaaaaaatttttatagaattatattgttttgtagtttttaagaaaaagattttgtatgttatttgttaaatttatttttaagaattttatttttggtattattttaagttgaaatagattttaaattttatttttaattatttgttgttagtatgtaaaaatataatagatttttgtatgtaaattttatattttatgattttttttaaagttatttattattttggtaatggttttgtaggttttttaggatttaaatatatagttttatttttttttgattttgatgttttgttttttttttttgttttattgtattggttagagttgttagtttagtattgaatagtagtgattagtggatatttttgtttgtgttaaatttataatgttaattttagatttgttatatatgatttttgttagattgaggaaatttttttttatttttaatttgttgaaattttttaatatgaatgggtatgattttagtaaatgttttttttgtatttatggaaatgattattgttttgttttttatttgtttaataggataaattataatgattgatttttgttttttgttttttttttttttttttttaaagaaatagagttttatttttgtttaggttgtagtatagtggtgttattgtagtttattgtagtttgaatttttggatttaagtaatttttttattttagttttttaagtagtagggattataggtatatgttattatgttaagttaatttttaatttttaaaattttttgtatagatggggttttattgtgttgtttaggttggtttgtaatttttgagtttaagtaatatttttatttttgttttttaaagtgttgagattataggtgtgagttattgtgtaggtttgattttttaatattgaattaattttgtatttttggaagaagtttaatttgtttatgagatattattttttttatatattgttaaatttgatttgtttagtttttaaggatttttgtgtgttgatttatgagggatattggtgtggtattttttttgtttgttagtttgttttggtaatgtttttgttagttttattttggttttataaaattagtttggaagtgtttttttttttttgttttttgtgtttttataaggttgatgttgttttttttttaaatgtttgatagaatttattaagaaaattgtttggatttagaattttttattaggaaaggtgattgtttgtttttaattataaatttaatttaatgtatagaaagagttatttaggtttttttatttttttttgttttatttttggtaagttgtattttgaaggaatttgttttttttaggtaagttgttgaatttatttatttaaagttgtttgtaatataagtatatttagggtttgtttttagattttggtaataaagtaaatattgtaataaagtatgttatataaattttttggttttttagtatatataaaagttatgtttaggttaggtatggtggtttatgtttgtaattttagttttttgggaggttaaggtgggtggattatttgaggttaggagtttgagaatagtttggttaatatggtgaaattttatttttattagaaatataaaaattagttgggtgtggtggtatatgtttgtagttttagttgtttgggaggttgaggtgggagaattgtttgaatttgggaggtggaggttgtggtgagttgagattatattattgtattttagattgggtgatagggtgagattttattttaaaaaaaaaagaaaaaagttatgtttatattatattatagtttattaaagtgtataagattattatgtttttttgttaaaaaatgttaataattatttgagtttttagtaagttataattttttttttggtagaaggtttgttttaatgttgatggttgttgattaggtggtggttgttgaaagttgaaggtagttgtggtagtagtttttttgttttttttttttttttttttttttttgagatagagttttgttttattgtttaggttggagtgtagtggtatgattttagtttattgtaatttttgttttttgggtttaagtaatttttttgttttagttttttgagtagttgggattataggtgtttgttattatgtttggttaatttttgtatttttagtagagatagggttttattttgttggttaggttggttttaaatttttgattttaggtgatttatttgttttggttttttaaagtgttgggattataggtgtgagttattgtatttggttggtagttttttaattgaagtttttgatatgggttgatttttttttttatgaaagatttttttgtggtatgtattatgtttgatagtattttatttataatagagttttttttaaaattagagttaatttttttaattttggttatggattgattaaataagttgatgtaatattttaaattttttgttgttattttaataatgtttatagtatttttgtttggagtagattttatttttaggaattattttgtttgtttatttataagaagtaattttttatttgtttaagtttgattatgggattgtagtaatttagttttatttttaggttttatttttaattttagttttttgttatttttattatatttgtagtgattttttttgttgaagttttaaattgtttatttatgagggttggaattaattttttttaaatttttgttaatgttgatattttaatttttttttgtgaattataagtgtttttaatggtatttagaatggggaattttttttagaaggtttttaatttattttgtttagatttattagaggaattattaattatggtagatattgttttataaaatatattttttaaataataagatttgaaaattaaatttattttttttttatgggttgtagaatgggtgttatattagtaggtatgaaaataatatttatttttatatatatttttgttagagtttttgggttataaggtgtattgttaatgagtaataatattttgaaaggattttttttttttgagtagtaggttttaatgatttttttttttttttgatggagttttgttgtgttatttagaatggaatgtggtggtatgattttggtttattgtaatttttgttttttgggtttaagtgatttttgtgttttagttttttgagtagttgggattataggtatatattattatgtttggttagtttttgtattttttgtagaaatagggttttattatgttggttaggttggttttgaatttttgattttaggtgatttatttgttttagttttttaaagtattgggattataggtatgagttattgtattgggttttatttgttttttttttgttgttgttttttaattgagatagagttttgttttgttgtttagattggagtgtagtagtgttattttagtttattgtagtttttgttttttaggtttaagtgatttttttgttttagttttttgagtagttgggattgtaggtgtgtattattatgtttggttaatttttgtatttttaatagagatgaggttttattattatgttggttaggttggttttgaatttttgaatttaggtgatttgtttgttttggttttttaaaatgttgggattatagttgtgagttattgtgtttggtttttttttgtttttttgtttttttttaaattgagatagagtttttttttgttgtttaggttggagtatagtggtatgattttggtttattgtaatttttgttttttgggtttaagtggtttttttgttttagttttttaagtagttggaattataggtgtgtgatattatgtttgaataatttttgtatttttagtagagatgtggttttattatgttggttaggttggttttgaatttttgattttaagtgatttttttgttttagtttttaaaagtgttgggattataggtgtgagttgttgtattaggttttaatgggtttttaatatttagtaaattatgttgtaaatagatgtgttgttaagtagggtttgttattttatttttgaagtatagatagaatagatttggtagaatttttaagggttttaggatttttggaatggttaatgagtattggttttaatttatggttaatagttgtgttagttttttatgagagttagtttgttttttgaagttttaaagataggtattgattttttttttttagttatgaaaattttagatgatatttttttttagtagaaggtgggatatttatgttgaaattttgttgtttagtgtagttatttttattagtgttttgagttagattttttgggtaatttgttgttgtttttttattagtatttgttgttttattttgtatttttatattatagagatggtttttttttttaaattttatgatttgatttttgttagttttaaattttttttttttagtttttttattttttttagtttttatattattgaagagagttagggttttgttttggattaggtttttgtttaagggaatgttgtggttgatttgattttttatttagattatttaaattttttttatattagtattaaggttgttttgttttttttttttttatgtgtgtattggaattgtatttttaattttttttaataatttttttttggtatttataatttggttagttatttggtataagagattttatttttgtttgttttggtttttgatatgttttttttatttagtttaattatttttagtttttgatttaaagtgagagatgggtgatttttttttttatttgaatatttagaggttattgtagggttattaattggtttaattttaatattgttgagttttagggaatagggatgtttgagtagagggagagagagtggggaatagttagttagtggagtagttagaatatataatgtttattgaataagtttattgttttatttggatgtggtttgttatgttttaaaaataattgtaataatggtattgaagattattgattattgggtgtggtggtttatgtttgtaattttagtattttgggaggttgaggtaggtggattatttgaggttaggagtttgagattagtttggttaatatggtgaaattttgtttttattaaaaatattaaaattagttaggtgtggtggtgggtgtttgtagttttagttattggggaagttggggtagaagagttgtttgaatttgggaggtggaggttgtagtgagttgagattatattattgtattttattgtattttagtttgggtaatagagtgagattttattttaaaaaaaaaaaaaaagggttgggtgtagtggtttatgtttgtaattttagtattttgggaggttgaggtgggtagattatgaggttaggggattgagattattttggttaatatgatgaaattttgtttttattaaagatatgaaaaaaatagttgggtgtggtggtgggtgtttgtagttttagttatttgggaggttgaggtaggagaatggtgtgaatttgggaggtggagtttgtagtgagttgagattgtgttgttgtattttagatagagtaagattttgttttaaaaaaaaaaaaataaagaaagaaaaaagaaaaaagagattatagattattatagtagatataataataatgaaaaagtttgaattattttaagaattattaaatttttatatagagatatagtgttaatatgttgttggaaaaatggtgttagtagatttatttgatgtagggttgttatgaatttttaatttgtaaaaagtgtagtatttgtgaagtataatgaaatgaggtgtgtttgtgttttttgttattgtaatgttggtaggatttgtaaggaaaatattttattttttttattgtgattttatgtttgttattttttttttattagtagtttggttaggaggttattaatttagatttttttaaagaattagtattggattttttttttttggtgtttatttttttgagtttttttgttatttttattatttttttttttgtatttgttttagtgtattagttagggtttagttaggaaataaaaattatattggtaatttgaatagtaatttgtaatataaagtgtttttaattgtaagaggtagttaattattaaagggattataaaggggtgatattgtgatataagaaagatgtatttgggttgggtttggtgtagtggtttatgtttgtaattttagtattttgggaggttgaggtaggtggattttttgagtttaggagtttgagattagtttgggtaatatggtgaaattttatgtttattaaaaatataaaaaattattttggtgtggtggtgtgtgtttgtggttttagttatttgggaggttgaggtgagaggatagtttgagtttgggaaggtagatgttgtggtgagttgagattgtattattgtattttagtttggatgatagagggagattttgttttaaaaattaatgtatttgtttgtttgtttgtttatttatttatttatttatttatttatttatttatttagtttttgttttttaattttgtttggtatgtagtttttaaaatttttgaaatttttaaagtgatgggtgtttttttgtttgttaaggaggtgattggtggttggaggtttttggatagtttggggataagggttggttgttaggggatttagttttgtgattagaaggttagaatttgtagttttttttatttattttttgtgaggtaagaggggatgaaggttgagttgattattaatggttaaagattttatgttatgtttatgtagtgaagtttttttgaaaatttaaaaggatgaggtttgtagagttttaggttgttgaatatttgtaggtgttgggagggtagtgtatttttttgtggaagttttatgttgttttttttatattttttttatgtattttttttagttggttgtttatttgtattttttgaaatattatttgtaataagttagtaattttaagtaaattgattttttgggttttgtgagttatttaagtaaattattgaatttgagaagggagttgtgaagattttaaatttgtagttaagttagatagaagttatgggtaatttggtgttttattatttgtgattgatttttgaagttgagggtagttttgtgagatggaatttttaatttatgggatttgtattaattttggttggtgttagaattgaattgaattgtaggatatttagttggggattgttgagtattggagaattgtttgggggttggtgggaggaaattatatatttggtgttagagttgaagtattgagtgttgtgaatgagagtggagagatagagtttgttttgttttatgtaagaggattttaaggagtatagaaagagtaaatatgagaagtagttattttagaagaaaatataggaggaaagttttgtgatattggagttggtaatgtttttttggatgtgatattgaaaatataataaaagaaataaatgataaattggattttattaaaatttaaaatttttgtgtattaaggaatattattaatggtgtgaaaaggaaatttatagaatggaagaaagtatttgaaaattgtatatttgataaaggattagtatttagaatatataaagaatttttataattaagttataaaataaaaaaaaataatttagtgaatagatatttttttatagaagatatattaatggttaagaagtataggaagagatgtgtagtgttattaattattagggaaatgaaaattaaagttataataaaatatgattttatattttttaaggtggttgttagttaaaatatggataatagtaagtgttggtaaggatatggagaaattggagttttgtgtattgttggtgggaatgtaaaatggtgtagttgttgtggaaaagatataataattgtttaaaaaattaaatttagaatgattataatatttagtgattttatttttagatgtatattttaaagaattgatagtagggatttgaataggtgtgttatatttttgtttgtagtagtattttttttataattaaaagatgtaggtaatttaggtgtttattagtggatgaatgaatagataaaatgtggtttatttgtatagtggaatattattttgttttaaaaaggaaggagaggttaggtgtggtggtttatgtttgtaattttagtgttttggaaggttgaggtgggtagattatttgaggttaggagtttgagattagtttggttagtatggtgaaattttgtttttgttaaaaatataaaaattagttaggtatgggggtatgtgtttgtaattttagttattagggaggttgaggtaggagaattgtttgaattagggaggtggaggttgtagtgagttgagattatgttattgtattttagtttgggtgatagagtaagattgttttaaaaaaaaaaaaaaaaaaaaaaaaaaaggagattttgatatatgttatagtatagatgagttttgaagatatgttaagtgatagaagttagatatgaaaagataaatattgtatgattttatttttatgaggtttttagagtagttaaatttagagagatagaaagtgggatggaggttgttagaggttgggggaagggagaatgaatgggaagttggtgtttaatggggatagaattgtagtttgggaagatgagatggatggtggtgatggttatataatagtgtgaatgtgttttatgttattaaattgtatatttgaaaatggttaaaatggtaaattttttgtgatggatattttaaggtatgtatgtaaatatatagaagtagttattattattggggttgatggaaaagaaattaagaatttggagtgttttttatattttgttatgttttatgtttaggttttgttggagagtgtgtgattgttatagaaatttgtagtttattggtaataaaaaggtttttgttagaaggtgtagaaagagtggatttgtaggattagtttattgggtagttgagaaatttattagagggtatgggtgggtaggagttgggtgtttgagaagtttgttgaggttttattgggttagagttggggtgttggagaaatttagtatagagtaggttttattgggtatatgttattggtagttgtgtttttagaggaaaaagagattttggaattaggaagagaagttgttattttagtaaggtttggtagttttttatagtgttgttttttgtggatagagtttgatatgattgtatttggttaaggagaaagatttataaggttttggtttagtattatggagtggggtttggtaggatgtatgtagagttaagaggtaatatatgggtaattggtatatttttttagattttttgttttttttgttgttttgttttgttttgttttgttttgttttgttttgagagagtattttgttttgttgtttaggttggagtgtagtggtatgatttaggtttattgtaatttttattttttgggtttaagttatttttttgttttagttttttaagtagttggagatgtttattatgtttagttaatttttgtatttttagtagagatagggttttattatgttggttaggttggttttgaatttttgattttaggtgatttatttgttttggttttttaaagtgttgggattataggtgtgagttatattgtatttggtttatttttttagatttttaaagtagatttttaggtttttttttttttttttttttttttttttttattttttttttaatataagtatttatagtttttttttaagtattagttttagtttatgtattttagtatgttgtgtttttattattattttatttgaaatattgtaaaattttttttgtgattttttttttgatttatgggttatttagaagtatgttgtttaatttgtaaatagttaaggtttttttgagtattttagagttattgatttttaatttaattttattttggttagataagtatattttgtatgtttttaaaatttgagatttatggtttagaatgtgtattttggtgaatgtattgtttttatttgagaaaaaaatatgtatatatattttagattttttgagtatagagttttataattgttgattaggttaattgttagttattagtgttttttagattatttgatgtttgttttttagatgttgagagaatggtgtttgttatggtttatttgtttgtgttttttaaaatttatatgttggagtttaatttttggtgtagtggtgttgggaattggggtattagggaagtattggtttatgagggtagagttattgtgaatgggattagttttttttgttatgtggggatatagtaggaaaaggatatttttgaagtagggagttagtttttattagatattgagtattttgattttggattttttagtttttagaattgtgagtattataatttgtttataaattatttagtttaaggtattttgttttaatattttgaatgaattgaggtggtgttaaaatttttaattatgtatttaggtgtagtggtttatatttgtaattttagtattttaggaggttaaggtgggtggattatttgaggttaggagtttgagattagtttggataatatggtgaaattttgtttttattaaaaatataaaaattagttgggtgtggtggtaggtttttgtaattttagttatttgggaggttgaggtaggagaattgtttgaatttaggaggtggaggttgtagtgagttgagattgtattattgtattttagtttgggtaataagagtgaaattttgttttaaaaaaaaaaaaaaagagtttttatttatgattgtggaattgtttatttttttttttaatttttttaggttttatattatgtattttgaagtttttttggttaggtgtatatatatttatgattataatggtgttttgatgaattgattatttaattatgatgaatgtatttttttattttgtaataattttattttggatttaattttattgatatttatgtagtttttttagtttttttaaatatgttgtttgggatgtataagaaggttggagaggtttatggagaaatttatgatggtttgatttatagttttttaattttattatggtgtgaatgtggtatgtatatagtagaaattgtattttaagtatgtgtgaaattattgtgttttttatttttagtatagtatttaataatttatatgagatagttaatattttattataaaataggttttgtgtttgttgattttgtttaattgtaggttgaagtaagtgttttaattatgttaaggtaggttaggttaagttagaatgtttggtaagttagatgtattaagtgtatttttgagatgatatttattttttatttatgatgggtttgttaagatataattttattattatttaagtagtattagtatgtttttttttaaatagaaaattttaatttgtgtttatattgaaatagtattttttgtagatagtatatagttgagttttgttattttatttattttgatagtttttgttttttaattggaatatttaggttatttttgtttaatatagttatagatatgattgggtttagagttattattttgttttttgatatttattttttttattttgtttttttggttttttttatgttaattaagtattttttagaattttattttaatttatgttttttttttttttttttttttaagatagagttttattttgttgtttaggttggagtgtaatagtatgattttggtttattgtaatttttgttttttgggtttaagtgatttttttgttttagtttttttagtatattgggattatagatgtttgttattatggttggttaatttttgtatttttagtaaagatggggttttattatgttggttaggttggttttgaatttttgattttaggtgatttgtttattttggttttttaaagtgttgggattataagtgtgagttattgagtttggtttgttttgattttttaattgtatttttttgtattgttattttagtagttattttatagattttattgtatatttttagttttttatagtttatttagaattaatattgtttttttttatggaaaaaaagtgtaagaattaggtaattttatgggtttatttattattttttattttgtatgtgatggttgttagatatttattatatttatatatattgtaaattagataatataataaggaaatttttgttttaaatagttttatgtattttaaagaaattaaaagtaaaatagaattttttttatttgtttatgtatttgttatattttgtgttttttatttttttttgaagagttgagtttttatttggttttattttttatgattttggagaatttgttttatggtttttgtagtgtaggtttgtagatagttaatttttttttatttttatttatttgtaaatttttattttgttgttattttttttttttttatttttatttttatttttgagatagagttttattttgtttttttataggttatagtgtaatggtgtgattttaaaatttttgtttaattttaatttattaattttttttttttgggtttaaatgatttttttgttttagttttttaagtagttgggattataggtatgtgttattatatttagttaatttttgtatttttagtagagatgggattttattatgatggttaggttggttttgaatttttgattttaagtgatttgtttgttttggttttttaaaatgttgggattataggtgtgagttattgtgtttagtttgttgttatttttgaattataattttattggttatagaattttgagttgttagtttttttttttaggattttaaaatatagggttttagtgtttttggtttttgttgtttttgttaaggaattagtatttatttagttatttttttgtagattatatgttgtttttttttggatgtttttaagattttttatttaagtttgattgtttagtatttatttttgggtaaaaaagtttttagaaattagaaatttatttagttttatttttttttgttaggtgtagattttattttagtttttatttatttgagatattttatattgattttaggttgttgttattttgtttttttaaatattttgtttagagttataatgttttttgtagaattgattagatagtagttattttttgtgattaggagttttgattttttagatttgttgatgggtttataaagtttttgtttgtggtttttagttggtagtggtttttttgttttgaagttgttatgagtgtgtaaaatttataggtttaattttttttattagtatagtttagaaaagtggaatttttggtttgggtggttatggtgttttagattattggttagattagggtggtgattgttagttggttgaatgtggggtttttagtttagtatttttggattttattttaggagttatggttgttttagggttaggggtttggttttagtttttgtttttttttttttttttttaagttgtttagtattaggttttaattagtattttttgtagatagggtgggttggttttttattagaggggtagggttgggtgggaagtttgttgagtttttttttttgtgtagtttatagttttggggttagttttagaggggtgtagaaaggagtttttaaaggtagaaatttatttttttttttgtttttgtgtttttagggataaaggagaggtggttttagttggggggttattagtggtatgtaggaggtttatatgattattgtttgttggggtttttttttttttgtgagagagatgagagagaggagagagagtgtgagttagggtagtgtttttttttagtaatgtagatttttgtatgtgttttttaggagaaattttgttatttgttagagttttagatttggaagaagttttgtttttttttttttttttagtgtagtgtgtgtgtgtgtgtgtgtgtgtgtgtttttatatgtattatatttttttatagaggaaataatttttgtttaagtgtaaaggttgggattggagtaggtagtatgtgggttaaaggagtagagaggaggaaatgggggtgggggtgagggtgggaataggaggtgggtagatgttatgaggtatgttttttataattagaagggttggtggagatgattagaatgttttagatagattttttattaaatttttaaaatttaattttgttttatgaagtttgaggattttgtagagtgaaagataaggaagggtttttttgtaggggggtgtgtgtgtttgtgtgtgtttgtgtgttgtgtgtttttatgtgtgtgtatgtgtggatttgtgtggtgtgtgtttgtatatgtgtgtatgtgtggatttgtgtggtgtgtgttgagtgtgtatatgtgtgtgtttgtgtgttgtgtatgtatttgtatatgtgtatatagattttattttttttttttttggtttattaagtgttagaaagaatttttgtgagtttttttattttttttaaggttgtatatggagggatttgtgtaggtatatgtgtgtgtgtatataatatatatatatatatatatatatatatatatatatatatatgagttaggggtgagtatttttgtggattgtatttaggtttggtaggaaattgggttttgggaaattgtaggttttatttttggtagaaaattatgtttttgttgttgtttgttgaagggaatattaagtggggttggggatagtttatgttgagaagagtaaattttgtttatggtattggggatattgagtggtttttgttttgggttttggagggtttgggagatatgtttgtagttttgggtattttttaaggttatgggtggttatatttaaggttaggtttttttttgtgtgagttgtggttagtaggaaggttgattttagaggtggttttagggtttttggaggttttgtttttgagatatgggttaaggttagagagttgagaaggttgttgttgaggattttggttggtgtttagtttagtggttttttaggtgggttttgtgtaggggttgatgaagttagttgggaaatttgtgaaataaagtataggttttttaggtttgtttagagttttggtattagatgaggtgtagagaagggaattgagttgttaagtgtgaataggagagaggagttttaggattatataggggttttgatatggtaggtgtttggttagtagtggtgttgtttttattgttggatgtgggaaaatgtattgatatttgttgattagagttggggtgagtatttgggtgattttgtagatgagataaaataagggttgttgtgggggaggggtttttgttgggttattttgttgaggttttgtgttattgttttgtggttgttataataaaggattataaatgaggtgatttaaaatatttgaaattggttatgtgtggtggtttatgtttgtaattttagtattttgggaggttgaggtggttggattatgaggttaggagattgagattattttggttaatatggtgaaattttgtttttattaaaaatataaaaaaaaaaaaaaaattagttgggtgtggtggtgggtgtttgtagttttagttgtttaggaggttgaggtaggagaatggtatgaattttggaggtggaggttgtagtgagttgagattgtgttattgtattttagtttgggtgatagagtaagattttgttttaaaaataaaaataaaaataaaaataaaaatatttgaaatgttttttttaaagtttttggagttagaaattttagattgaggtgtttgaaggtttattttttttgggggttttgagggagattgttttatgtttttttttgagttttgtggtggttagtaatttttggtattttttggtttgtagtttggtttattttttatttggtttttattttgtgtttttttttgtgtttttgtttaaattgttttttttgttgtttttttaatttatttttagggataggtttttattttgttttttaggttggagtgtagtggtgtgattatggtttattgtagttttagttttttaggtttaagtaatttttttattttagttttttaagtagttgggatataggtgtatgttattatgtttggttaattttttaatttttttgtagagatgagggtttaggttggttttaaatttttgtgtttaggtaatgagattttgttttttaaaatattgggattagagatatgagttgttgtgtttagtttatttttgttttataaagatatttgttattggatttagggtttattttgatttaatatgtttttaaataatttaattatatttttaaagattttatgtttatataaagttatatttataggtattggggggttaggatttgtatatgttttttgggggaatataatttaatttataatgggttttatttatagaatgaatggtttttttagggtgtgtgtaggtgggtgaggggtttaggagagggatttgtgtggtaagagggtttgtgtttatgttagagattttagaaggagattggatggggtggttgtatggagtaaggggttatagttattgtttttaagtagttggtgggttgtttggtagaaagggagtatttattttgagtttttttaagatatgaagttagtattaggtatttggaaggtgttagtgagtagagtttgattttttatagaaagaggtgttttttttataatgtttatttgaggatggtggaataggttattttataaggtagtgagttttttatgtttggaagtatttaagtaggggttatgtgggagttgtttaggagtgtatagaagggattttagaggtttttgttaatattatttttgtttgttttattttatgataatttgaattttagaatgtaatgttattggggatatgtttattagaggggtttttagtattaggttttatatattatgtattatttttagggtagggaatgagagtaggttttattttttttggttgtttgtgaggattaggaggtttgttgttgaggtagttttttgtggaaatagtgttttagttttgtaatttatttattggagttttaatattttaatgaaatattgtgttagatgggttttgggtatgtgtgtgtagattgttataagtttatgagaatgtatatatgtatattgtatgtgtgtgtatatatgtatgtatatatgtataagaatatgaagatttgaggtaggtatagtttgtgagatagatttttttaggttgaaagattttttataagggtttttagaataaggttttagttttggtagttttttttatttttggtgggaggatttttatagagaagaagggttaagaagtatagtttttgatgtttatggtgtattaagttttgttttaagtttgtgttttattttttatttatttagtaaatttgttgtttttgttttgtgttagatgttgtttttagtattttataaatattgatgtatgtttgttttatgataattttgtgaagtaggtagtgttattttgttttatagatgaggaaataggtgtagagggataaagggatttgtttaaggtttgtttttattttatatgtatatgaatgtttatttatgtggtaggtgttagtttttttttgatgtgagttaggttttgagttggttggggtttgggttttattttggttgtgttttgttgtgggtattaaggaagtttttagtagttttatttttttggtatgatttagttttagggattggatttttttaaatgtttttgtttagtttggagttttttttttagttgggggagggttgaatgattttttatttttggaggttgttggagttttttttgtttgtatgtggttgttgttgggtggataggtttgtttgtgggttgaggtttttagtagttggggtggattatttttttttttaagaagttttgggagaagtagttgagggggttagtgtttttttgaggttaattttttgttttttttagtgtaggtgtgaagttatttttgtttgtgtgtttgttatagatagtggagggtggtgtaattgtgatgtttgtttgttgtattttgtgtttttgaggatgttgatttttggttggtgttgggtgtttgttttttagttattttgttttgatttggtgtggtaggtttgagtattgtttttttataaggaaataggtttagaggttttgagttatttgtttgggtttttttagttaataattggttgagttaggatttttatttagttttgtgattttagaagtttaagttttttttattatgttagggttaggaaaggattagaatgtttttttatgtgttgattatttggatgatttgtgtagtttagtttgttgtagttgtttaataaaaatgtggaatgaatgggtttatatgttttattgtgtgatttagagttaatgattttggttgatttttttgtttttattttgtggtttagtatttttttttggggtgtgtgattttggaagtagtgattttttttattttattttgaatggtgtttgtgttgtagtaggggagtagttggggattgttagtgtttgttgttggtgggttgtgtgttagattttgttttggatgtgtgggtgattgttagttatatgtgtgtgaagggttgtgtgtgtaggatttgtgtaaatgtgtttttttttgttgttagtttatgggaggttgttaagattttgtttttgtatattagtttatattttttttgtggtttattgttgtggttgtttttttgtgttatgtggttgtaggtatagtttttaagtggatggggattgtgggttgaatgtgtattagatgtttttgttttttggtgggtggagatttttaatttatgtattgtggttgttgtatttgaaaggttttttatggtgaaggatttggatttgagtaattttttgtagaggttttagaagtgttttttggttgggtgtggtggtttatatttgtaattttagtattttgggaggttgaggtgggtggattataaggttaggagattgagattattttggttaatatggtgaaattttgtttttattaaaaatataaaaaattagttgggtgtggtggtgggtgtttgtagttttagttatttgggaggttgaggtaggagaatggtgtgaatttaggaggtggagtttgtagtgagttgagattgtgttattgtattttagtttgggtgatagagtgagattttgttttaaaaaaaaaaaaaaaatgaagtgtttttagtttttttttttgtggtgaggttttgagtttttatttttagaagaaaatttggttggggagggtatttttagatttggatataaatgttaggagattagggttgtttttttaggtgattaattatagagatttagggaaagttatgtttggaagaggtgatattgtgttttagttttatttatttttttattttatagatattgtttggtgtttagtttgtattgtgaggttttttaagtagttttgggtattgtgtatttggtatggtttttagttttatttttttgttttgggagatttggtggggattttgggttgagtttttgtggttgtggaattttggtggtttattgtggtggttgagaatagggatgtggggttggatgggttgagtgtaatttttagtggttttgtgaattgtttgggagttttgggtagtttttttttattttgtgtttttgttttttgatggaaaaatgggggttaggggggagtgattttgaaggtatttgtgggaattaagtgaggtgataaatgtagtgtttttggtagagaattggatatagagtttatttttatgaagggggttgttttttttttttttatgtttttttttgtttttatttttttttttgtattttttttttttgtttttttttttttttttttttttttttatatgtaggtatattttatttggtgttttaattgtttttttttattgtttttttgtaagtggttttttaagtgggaatttaggtttggaaagggtgggtattttgtttggtgggttttggtaggttaggtgttgagtagttttaggagatataattttaggaaaaggtttatgtaggttggttgttatgatggattgttggtgggagaggggaaggtgttgtggtaggggaagttttggaaatatttattagtggttttatttatgatttaggatatttgttaggttattagaatatagttgaggaagttgttggttagatgtttagaagtattaatttggtggttgggttgtggggggatttttttggataggtagataaggtgttggaggaaggggttgatatttatttagtgtttgttatgtattgagggtataaagggtaggatggagagttggtttatgttatttgtggaattttttaggtgtgggggtagatggggaagtaagggggtttgaagatatatgtgtttattaaatgtttttaaattttaagaagaagaataaggatatatttataggggtagggttgaaagtttgatgtatggtgttttggggtttgtttttgttgtaatagttatagtggtttttttttattttttttttttttttattttgttgtgaaaatgtttaaaatatatggttaagttgaaagtattttatagggaatatatttagttattatttagattttattattaatattaagttatatttgttttattattttattgtttatttattttttttttgtttggttatgaatttattttatttttattttttggtgtattttaaagtaattttaggttattttgattatttttggaattattgttagaaatttttttttttttttttttttttttttttttttttttttttgagatgggattttgttaggttatttaggttgaagtgtggtggtgtagttatagtatattgtagtttttaatttttgagtttaagtaatttttttgttttagttttttgagtagttgggattgtaggtatttattattatatttagttttatttttaaaattttttattaattttttattttttgtatttatttaggattattttttataaagttagggtgttgtaggaggggttagaattttaagttttaattttggttttgttattaatattgtgtgatttttagtaaattattttgtttgtttaggttttgtttttatttttatgaaatgagggtgttaaattgtatgttataaataatgagggttattagttattaagtttttattttaggttaggtattttttatatgttattatgagtttttttaatttaggtattgtttttaatggatagtttagttaatggaagtttagagaggtggtgtaatttgttaaaagttttattatttagtgaatgtttttatggggtttgtatttaggagtttgatatagagtttaggttttagtatttggtgatgttttgggggtgtgagtagtttagtttattttgggtatgtgtttatttgttgttttttttgttttatgtttgtgtttgttttttttgaagtttagattgttattttttagttttaaatattaaaattggttaggtatggtggtttatgtttgtaattttagtattttgggagattaaggtgggtggattatttgaagttaggagtttaagattagtttggttaatatggtaaaattttatttttataaaaaatataaaaattagttagatatggtggtgtgtatttgtagttttagttatttaaggagaatttagttatttagttattgaggtatgagaattatttaaatttgggaggtggaggttgtagtgagttgagattgtattatttttttttaggttaggtaataagtgtgagattttgttttaaaaataataaataaataaaataaaataaaaattaaaattaaatgttaaaattaatttataaaataaattttggttaaagtagtttgtttattttgttttaattatgtatattgtattagattttgttaggggtttagtgtataaagatgagatttttgttttgttagataggtgggatgatggttatattttgagttagttaaggtattatttggttgtgtaataaaagttaaaatattagaggttgagtagtatttggatttatgttttagtttaagtgttagttgttatgggggtttaggatagtttggatttagtttatttttttggtgtatttttgatatatagtttttattttttgagttgagatggttttagtttttgttgttatgtttgtattttagttagagggaagggaagaagggagaggggaaagggtaagtgtttttttttatttttaagggtatgatttgaaagttaaatattttagtttttttttattggttagaatttagttgtatggttgtttttgttattagggaggttgagtaatgtattttttagttgggtttttttgtgtataattaaaattttagttattatagaaaaaagggagtttagatattggggaaataattagtatttgtattatatgtattgatagttttttttgtatgaatagagttgtggtaggttttatgttagggagaaagtaagattggaaaagagtttattaaggaggtggtatttgtattgtgtttaaggggtaagaaaaatgttttttaattaggagttataaatgtttggttgaagtgttattgtttttttattttggagttggaatagatgttattagttaattatgatggttgttgggtgtattggttaatatttataattttagtattttgtgaggttgagggtgggaagattgtttggggttaggagtttgagattagtttgggtaaattgtaagattttgtttttgtaaaaaaatataaaatgtagttgagtgtggtggtatttgtagatttagttttagttatttgagaggttgagatgggaggattgtttgggtttaggagtttgaggttgtagtgagttatgattgtattattgtattttagtttgggtgatagagtaggatttgtttttaaaaataataaaataaaattaaagttttaaaatggaaaaaaaattatgagtatataattttagatgtatttttaagatagtaaatttgggtgggtgtagtggtttatgtttgtaattttggtattttgggaggttaaggtgggtggattatttgaggttaggagtttgagattagtttggttaatagttttatttgtattataaatataaaattagttgggtatggtggtgggtatttgtgattttagttatttggaaggttgaggtaggagaattgtttgaatttaggaggtggaggttgtagtgagttaagattatattattgtattttagtttggagaaaaaaagtaaaattttgttttaaaaaaaaaaaaaaaaagtaaatttagggttaggtttgtagttatatggttatttttttttttgagtatggaggtagttttagaaatttgttttatattatattagtgggtagttgattgggttagtttgttagttgaattttatttgttatagttattttttatagtaaggggtattttagatatatttttttttttagggaagaataagttgtagttgtttgagtgttttatttagtggtgtgtatgtttttttttaattttgtgtttagtgatgttttgtttgtagtttgaaatttgttatagtgggtgtgtttatattataggaattggtaaatattatatattaggttttattttttgttttttattagggtaggttgttttttttttgttgtttttgttttttgtttttttttttttttgagatggagttttgttttgttgtttaggttggtgtggagtgatgtgatttttgtttattgtaagttttgtttttttggtttatattatttttttgtttgagtttttagaatagttgggattataggtgtttgttattatatttggttaattttttgtatttttagtagagatggggttttattgtgttagttaggatggttttgattttttgattttgtaatttgttttttttggttttttaaaatgttggtattatgttattgtgtttggtttagggtaggttgttagaaatgtattagtttgttagttttagttttgtttgttttttattttttttttttttttttttttttttgagatggggtttttttttgttgttttttaggttggagtgtagtggtgtgattttggtttattgtaatttttgttttttgggattaagtgatttttttgttttagttttttaagtagttgggattataggtgtttattattatgtttagttaaattttgtatttttagtagagatggggttttattatattggttaggttggtattgaattttttatttaaggtgatttatttgttttggttttttaaagtgttgggattataggtgtgagttattgtattgggttttttttgtttttttttaatgaaaatttttttgaaagatttgtttattgatgtttgtgttaataggtattgtttgtgggatagagtttgttttttttttgaaggtttttttttgtttgggtgattatttgtatgttattttttgttgtttagaattaaagatgtagttatgtttggggtaggttgggaaaatttgtgggaattatagagtttgttgttatgttgtgttttggatatttgaagtttggtaggtaggtgggattgagggtgggtattaggaaagtgatgtggttttataggaaggggatataggttttgagattttaggtttttaattggataaagttgttttttttttttggataaatgttttagtttatttataattgagtggttagtttttttttttttttttttttttttttttttgagatggagttttgtttttttgtttaggttggagtgtagtggtgttattttggtttattgtaagttttgttttttaggtttatgttatttttttgttttagtttttggagtagttgggattataggtgtttgttattgtgtttggttaattttttgtatttttagtagagatagggttttattgtgttagttaggatggttttgattttttgattttgtgatttgtttgttttggttttttaaagtgttgggattataggtgtgagttattgtgtttggttaagtggttagtttttttagttgttgggttttgtatattttgttggttttggagattatatgtattatgtagattttatttgttttttatttttagtgttgggggaggggttaagggtttgttgatgtgttgatatttggttatttattggttttgaatgtttatatttatttttttgaaattgatgttttgtattggaggttttatgtggatttgggggtagaggtttgtattttagatggtggggtggtttttattaattaggtagattttttgttttgttttgttttttgggttttgtagttttagatgtgtgtttaagatttgtggttatatggatgggataagttatagagatttagattttgtggtttttgtgattagagtagttgtggttttgtttgggaatgtttttattttgttgttgaaggtgagaaatttttttgtgttggagaatagttgtgttgagaagttggtttatttggtttgtaggattgttggggtaagggaggtttgttgttggttttttttttttttttttgattgggtgttttttgtttaggttttttgtagtaaaagaattttttaatttattttgtttttttattgagtttttattttatgaagtttattttttaattttagttgattggtttttatttttttaagaggaaggttaggggtagatgaggttgaaggaggttgatttttttgtgtttttgtagtttgagttgatgttgttgtatgtttatagggtttttttagtttttaaaaaggttttaatatgtttgttatatgtttgtggtttttttggatgttatattaatttagtaaggtttgagttagaggttgtttttgaggttgtgaaaatagaagaagggtttagaggagaatttttttatttgatgattttaggaaggttttttagaagaagtagtttttgagttgagatttgaagatagattaggtttgagttaggttagggagggtgtgaggggtttattaggtagagggaataggatagggtaggtatagaggtttggtatttggtttgtggggaagtgtgagtttttgggtatgattaaggtggggagaagtggtgtgagaggaggtagatgtggttggtaggagattggtggttttggttttgttgagttttattttgtatgtattaggtgatagaggttgtttaggatggtgggtagggaagtgataggttatatggttattttattaatagttgggagtttagtttggggggatttaagattttggggaaggtatgagttaggggtttgttagagttaggagttagtgggagaaggaaatagtgttgtttatgaattataaatagatatttttgtaattttttttgatgtgatataattttaaagtgggttatttagaggtgggaaggtgatttttggttttttaggttttgggtttgttttttttttttttttttttttttttttgagatggagttttattttgttgtttaggttggagtgtagtggtgtaattttggtttattattatttttgttttttgtgtttaagtaatttttttgttttagttttttgagtagttgggattataggtatttgttattatatttggttaatttttgtatttttagtagagatggtgttttattatgttggttaggttggttttgaatttttgattttaggtgatttgtttattttggttttttaaagtgttgggattataggtatgagttattgtgtttagttgagtttatttttaagttttttttggtttttagtgtttttgtattagtttatttttttggttttttgtttttaagagttttttttaagattgtttttaagtggataggtttttagaattaaggagtagttttaggagtttttagttatagatattttagggggtttgtgtggtttttagtttttggtttggttttggtagttttggttttttgtgttgttttttatatagtttggttagagttggttaggttttttggttgggttgagttattgtggttagtgatttatgtagggggagaaaagtgaggagggggaatagagtgtgagggggattgtgttaataataaatttattaggtttttgaggttattttataggagggataaatggtttatttaggttgatttggttgttggttggtttttagagatatttagggtggggaagattttattatttggggaaagtaatattagattgtttggaggggtttagttagtgtattttgtgttttttgtttgttttttatgtagagtgttttgtttttaaggtggtaggttaagagtgtgagttgaggtttaggtgtaaagaggggtgtggtatgggggtattgtagggtatggggtgtatgtatttttatttatttttttattgagtgttagggtaatttgttaatggggtatatttggtgatataaaattttttgttgatttatggtagtttggaatggagtggaagtgttttatttttggggaatttttatatatatttggttgtgaatgttggtgtttttgtattggagtttttttggagtgtgttgggtagagtggagaggtttttttttttttttttttattattttgtggaggtgttaatatgtagttagagatggttagtggtagtgaggagaggggggtaggaagagattagggttgggggtttgttagtttatagttttatttttgaatatttatggtttttttgtttaggttagtgaggttgggggtagagatgggtaggggttttttaatgttgggtatttttttgtttttttatattttggatttgttttttggagaaagttttggagtatttagaagttttggggttgttggttgaggtggggagtagagtttagttgtgtttggaggttttttatttttatttagtttttagggatagttttagttgtgtaggtttaggttgttgaggttggttttagaaatttttttataattattattggatggaaaattagttttttaaagggttttagagttagttttgtttttttttttataggtttttatagttagagtattgggtttttgttagagatgtagaagagatgatgtttttagtttttatgtggtttggtttttattgtggatgttggtgattttagttttttttttaaaattaagagggttgatgttttatattttaggtttttagaaagagttgttatttatttatattgttatattttttttttatttttttgttttggaaagagtagagtggatatgtgtttttgtagaaatttatttatagtttgattgtagatgtattttgtttttttattgagtttttgttttatgaagtttgttttgtttgtattttttttttttttttttttttttttttttttttttttttttttttttgtttttttttttttttttttttttttgttttattttttttttttttttttttttttttttttttttttttttttttttttgttttttttattttttttttttttttttttttttttttttgaatagttaaagatagaatgaatggtataggtaggtattgagttttttgtaattggaggtgtttaagtgtagggtggatgggtatttatagggtaggtattgaggaaggatttttttgggattgtggatggtaggataggttttgtggagttttttgagtgggtgtagaagagggagggtatgtttttgttttttgttttttttgggttgttaggttgttatttttaatttttattttttttttttttatttgttgggttttatgggatgggtagaggtattgttagaatatggagttgtggtttatagagggttagtagggaggagagttttttggggattatgttgttttagttattgtggtgattttgaaaataaatgtttttttttttgtttgagtttttgttgtttttgttgatgtggaattagggtaggttggtgatttagtttttatttttgtattgtattggtggtaagttgtttttagttttagattttatagagtagggtgttttttttagaaaaatagtagggaggttaggatattaagggttttagggatagtttgttttttttggttggtatgagttttagttaagttttttggtattttgggggtgaggaggtattagttgtgtgttttagttattggttgttttgaggttgggttggtgttaggttggttatttttttttgttttttagtgtgattttgtagagtttttggaagggttagagggtttttttttattattggtgtttatgggatattgtgtttttattttatttttgtattttagttttagatgggtgttaggaagttggagattttagttattttatgattgtgttttgtggggttggagtaggaataggagtaggaggaatgttttggttatgggattgtgtgaagagagaaggattaggaagaaaatatgagttattatgtttgggttatattttagtagagttgttggtggttttttaggtatttgaatttattaattataaagtttattaggtgtgtaaataaataaatgttgtttaggaggtatagttagggttttgttggagagggattattttggaggggttatattttttatttagttttttagtttttttgttttgtgtgtgtgtagtttttgattattattatttttgtttttgttatttgtttttagggttttattaggttggatgttattgtaataaaatgtagtaatagaaggtttaggtagtgttgtagtttttggtggtattattagagttagtaggtagtagggttggggaattttaagttgatttagttttaagtgttggagtggggagtttggatgaggtgggggtggggaattggggagttatggagtagagtatttgttgtgttgaaggttaggagtttttttgggagattatgaatttagaatattaatattttgtttaaaaagttttttgttttggagataagagtttaggttgttgtggttaggttttgttgtaaatgttttgtataaagtaggttggggggattattgggaagtttggggaatagattggttatgtgtttttttgagtgaaattttatggttgtattgaagtggttaggtagagggtgtgatggggtgtggtagttgtatattggtttagttaggttgaatggggaaatgtaaatttaggtggtttgaaagagatttagtggtttatagtttggtggttgtttttagtataggtgatgtaaagagagaaggggttttgggggtttggtttaggtggaaattatgtattgtttgtgattttgggtatgttgaggttggagtaggtttgtttggtggttggtagaatgtatatgaagaatttatgtgtgttttgaatgttttttttgtttttttgggtttatgttttattaggagttttttgattttgttattttgtaaaggaaattgtgttttgttattgtataggattgaataggtgtgtgtggagtttttaaagttattgttttaaggggttttatgggataatgggagagttgttgtgatgtttaagattaaagtgatggttgggtgtagtggtttatgtttgtaattttagtattttgggaggttgaggaggatggattatttgaggttaggagtttgagattattttggttaatatggtgaaattttatttttattaaaaaaataaaaattagttgggtatggtagtgggtgtttgtaattttagttatttgggaggttgaggtaggagaattgttttgatttgggaggtggaggttgtagtgagttgagattatgttattatattatagtttgggtgatagagtgagattgtttaaaataataataatgttaataataaataaaataataataataaaataataaaagtaaggatttgaataaatatttgtatatttatgtttgtagtagttttatttttaattgtttaaatgtggaaggaatggatatataaagtgtgtgtatatatagtggaatattatttagtttttaaaaggaatggaattttgttattatatgtgaattttgaataatgaattttgaagattttatgttatgtaagtttgttttataaggataaatattgtatgattttatttatgtgaagttaaatttatagagaaattggaatgatggttgttagtagttaggggaaggaaggatggggagttattgtttaatgaggatagagttttagtttgggaagttggaagaagttttggaggtggatggtgttgatgggtgtataatgtgaatgtatttaatgttattaatatggaaatttggttaaaatggtaaatttgttttttttgtttttgttttttttttttttgagatggagttttgttttgttgtttaggttggagtgtattggtgtgattttggtttattgtaatttttgttttttaggtttaggtgatttttgtgttttagttttttagagagttgggattataggtgtttgttattatgtttggttgatttttgtatttttagtagagatagggttttattatgttggttaggttggttttgaatttttgattttaggtgatttatttattttggttttttaaagtgttgggattataggtgtgagttatggtggttggttaaaaatggtaaattttatattatatatattttattatagtaaaaatgtattgttttattagaaaaatgatagatttttataatatgaattaaattataagttatgaaggaaaaattaagtaaaatattaaaaaattatttataagtaattatatttaaaataaaagataataaatatataatttttattattttttaggttttttgtaatatttaattattgtttgttttgttgtggttatgtttttgaggttgtatttgtatgatagaaatattatatttgtggtgattaaatatttttttttagttttatttttaatgatgttatatagataatttgaaattggttggttgggtatgatggtttatgtttgtaattttagtattttgggaggttaaggtaggtagattatttgagtttaaaattagtttggttagtagggtgaatttttatttttagtaaaaatataaaaattagttaggagtggtggtgggtgtttgtaatttgagttatttgggaggttgaggtaggagaattatttgaatttgggaggtggagtttgtagtgagttaggattgttttattgtattttagattgggtgatagagtgagattttgttaaaaaagaaaagaaaagaaagaaattggttaaggtaggaatattgatattataggaataggtaagtgttataaattgggaaattgagtgttgttgtttttgttggttttaggtggttggttgttgattgttaattggtatattattggaggagggaggtttagattgatttgtagagagattagaggtagaaatgtattatggtttggatgttgagggtgagggaaagagaggagttaatagtggtgtttggagatttggtttgagtaattaggtggatggtagtattgttttttaagatgaggggttgtgggaatttgaggggttgtggaaggttttgttattgatggatttagggtttggtagttttgggaggtttattttgtgttaggttatgtagagataagattatttgggttttgtttttgggaagtttttgtttatgaggatatagtttgttatttaatggggtgttttgtttggagttttagtgttgttgggagaaagttttttatttttttttgttttttgagttttttttgtttttttgttagttgagtttttttatggaggttgtgtttggaggggggttatggatatggatgtgtgtgttaaatgttgtttttttgtggattttttttttattttgtttttatgttttgtaagttttatttttttggggtttgatttgtggggtttttttttagatttgtttttttttatttttagaaaggtgtgtaggggttttttatggtttttttttttgtttttatttttttttttttgggatagtgatttgttggatgggtgggttatttatagggtttgtgattgtttagatatttttgttgtatgaagttttgattttaaggtatgatgtagatgggaataaggtatgagttttttttggttgttgtaataattgttgaaattgggtggtttatagtaaggggaatgtgtttttttatagttttggaggttagaagtttgaaattaaggtgttagtagggttagttttttttgaagattttaggggaaaatttttttttgttttttttagtttttggtggttttaggtgttttttggtttgtggttgtattattttggtttttgtttttgtttttataaggtttttttttgtgtttttgtatttttttttttgttttttagaaggatatagtattgaatttagggtttattttattttgagatttttgtttaaattttttttgtagagatttttaaatagaattaggttatatttgaggttttaagtgggtatatttttgttttgggggggattattggtttattgtaggttttgttgtgtattgaagatgtaggtggtttttttggttaggtttgtagttggttttgtttttttttgtgattgtggaagaatgtattttgttggatgtataggtttttatagtttttttgtttttgttaaattttagtttagttttttttttgttgttggtgtgtattttttttgtttagtgttttttttgggattgtgtgtttaggttttgaggttttagaaaaggggggtggagggtttttttattattttgtagtaatgaggttttattaaaattttggagttttagattggatttagtttttagttatgattaaaggatagtttgggatatgattaaagggttagagaaagatgatttaggttgagaaagaggaggttaaggagtaattggattgtttttgaatgtggaaaaggtaattatgatttgaagggtggtgtttagttgttttttattttttttgaggataggaaaaaaaaggaaataaatgatgtataattagagtagttggttagatatgagggtgaattttttggttgggagtatggttaagttttgatttgggttttttgaaagagtttggggaatttttttatttggaggtttttaggtttggttatgtggttttgagtgattatattgaaggggtagtggttggggttggagttggtgggttttgagtatagttatgaaggtatgtgtattttttggttgtttttttgttattgttttttgggtttttattttggtgaggtgtgtattttggtggtgttttttagggaattaaatatgtttgttgtattgtgtgtggagatggagaatgtataattggttgattttgtgttaatttggtggaattttatgttagttttgggaaagaataattgtatgggtgtgtttatatttattaggtgttttttagaaaaatatttgagaataatgttgtggtttaggatggttgttgtgttggatttggtatttttttaggggggttgtgttgttgggttgagttttttaggtattggatttttaaatttttaaatatggtgtggataggtggtttagtaggggttggattatttgataggtttaggtgttggagtttagataagatatattttggtttggtgtggaagatatggggtgttattaatggtagtaatggttgtatttttgaaatttgggtttttaggttgatgagggtgtgtatgtatttgaaatgtttgtggttttgtagtttttatgtttataaatttatttggttgaaaatagtttaaaatatttaaagtatgagggagggagtgtttgttttttttaaaaaggaaggatttgattttatttatttaaaaagttatttaaatttagaatattttttgtaagagattttttgttttttgtttttttagaatggttggagagttttagtatttttgtatatttgggatattttagagggggtggggaggggtaagtgggtagtgagtgattttagatttaggatgagttgttaggtgttttttggttatatatttaagggattggagtgtagttgtagtgttgtggtttgttgttttgggggtgggggtgttgttttatgttgtgaatttttatatggtttttgattttgggtagaggttgagggtttaagggatggggtgatagggagagtatgtaggagtgggtttttggttttttagggtgagtggaagaagtgttttttttttttgtaggtgatagatttggggggttttttttgaggatgagagtttgttgttttttaagttttgtgtttaatttaggtttttaggtttattttagttttttggttttgtttgttttgtggatgatatagtttaagggtagagattgttggtttggagggaaggttaggttttaggttagggtttagaagggagggagaagtttttggggtagttttttttttgtttatttattgtttagtttttttttttatatttttttttggaaatgtttgtttttgataaggtttattttttgtttttaggaggtttttattgtggaggaagggaggtgttgtttgtttttggtttttttgatagttgtgttttatttttgttttgtgtttttttttttggatagtgttttttttagggtttatttaggagggtgtagtggtggtttttggggtggtggttgtggtgggggtgttagttgtaggggtgtttttggtgggtgggagttggtggttttttgttggtgttatgggatttgtatgtttgttttgtgttttttggtttttgagtttataggttgggattttgtttgttagttgtgtgtgttgttgtttaatttttgtaggtgtagagtgtgtggtggtggtgatagagaattttgtttggttgtttaaatatagttttttgtagaaggattttgtgtttggggaaggggaggaatttttttttttttgggtgtttgttttttttgttatggtttggtttttatatttgtttatatttggttgtagtggggtgtttggggggaggggttgaggttgtgttttttgttgttttttgggtgtgggttaggtggggaggaggggggtgttttggttgtgtgtttaggattgttttttagtggttatttgggttttagttttttaggtttggttttgataggtgggtggagtagttagtgtgagatagggaggttggtgtgggtgtgggaatttgatttgtttgggaggtgggggtggggtgggggtgtagtgtgtggggaggggttggtgtttgttttttttttttatttatttagttgagttagggggtttaggggtttttttggtggttagttttgtattgtaggagtgtgggtgtggtgttttagttagtgtgtagggtttgggttttgttgggggtgtttttttgttgttgttttttgtgtgatttgttgtttattagttattatgttggattttgtggttaatgtgtagttggatgggattattttggattttgaaggtgggtgttgggttggttgttgtggttgtggatgtgttggagaggattttgtgggtgggtttggtgtgggatgggggtgtgttgaggggagatgggagtgtgttgaggggagatgggatttttaatttaggtgtttttttgttgagagtgttgtgtgtttttggttttgtgtttgtgttgtttatgtgggggattttgttaggggtatttgtgtagattttgtgtgtttttataggattttgtgtttgttttgtgtattgttgtttgggtttttttttttttattgttgtttgtgtttgttaagtgatagtgatttttttgagggtttgtgaggttgttttggaattttttaggatgtatagttttattttgggaaatttattggttttttttttttggttttttttggtggtttttgggttttgtttggatttggtaatgggatagggaggttgttttttatttttgattgagtggatagttgtgttttgtttgggtggatagttttttttttttttatgttagttttggggttgttaagttgtgtagtttgtgggttgggagtattgaatggatatagtttaggttgtggtagggtttagagtgggatgttttatggtttttatttaggtttggggatatttttatttgttttttagaattgggttgtgggggatagaaggggtttgtgtgtgggtagggagagtattttggtttttttttgtttttggggtttataaagtgtgttgggatttgtggggttgttttgtttaagtttgggtttggtgtttgtgtttttgagtttgtgagtgtgtgtgtttttttgtgtttttttgattgttggtgttggggttttgtgttttgtgtttgtgggagtaaatatagtaggtgaaggggaagtttatataatggtttttagtgttttggggtagggtttttgaggggtgggtttgtttttgttgggatttggagtttttgttttttggagaggtttttaggttgatttgggtagagttttttggtgggttgggagggggaaaggttgtgttgaaatgagtaaattgtttaggtgttaggttaagttgggaggtgattagtttgaggttttttttgttttatggttagaattagggttgatatttgggtgttttgagtttagttgtttatatggtttatttggggttagttttatttgagtgggggaggtggggttttttgggggattagaattttggttggatgttaagtagagtgttagtggttgttttttagggttgggtttgaggagggtgtggggtggtgaagggatgggagggggttgtgatttagtggttattggtgttgtgtagagtgtgagttggaaatattgtagttattttgttagtttagtggtgaaagtttttttttaggttttatttttttgtatttttgttttttagagggaggggaggtttgggtttgtagagttgggagggtttgttgtttttgttttttttttttataatatttttttatttggatatttttgggtatatgtttatattggggtttttttaggtttattgtgttttgttgagttttttgtagtttttgagtgaatgtgatttttttgtttttgtttttttgtaatttttttttgtgattgtttttttaggggttttttttgttttaaatgtttaagtggtatgatttagttggtttgattattttttagtaagtttttatggagagaggttttgtgttgtgtagagttttttttttgtttgtgggattgaggtttttgtttttagtttttaatagaaagtgttgggtttttagtgggatttttggggaagaatttttgtgttttaatgggagttttgtggtgggaggggaggttagggtttggggttgtgtttgttgtatagttgttattatttgtattatgaaagttgttagtgttttttttttgggtttttgggtgtaattttatttttgtttttatgtgtttttatttggagttgtttttgtggttgttttttaagttagttttgtgattttgtaatttagtttaagataatgggtttattgagattattttggtgtagtagttggtaattttttggttttgggggaaggttttttagttttggggagtggggttttaatttgttggttttttgtgtttattagttttttttttgtgtgttttgaatggttttgttgggaattttggttttagagttattaggtggtttgagttgataggtgtgagagagtgtgtgtgtgtatgagtgtgtatgtgtatgggggttgatttggggtatggaaaggtggttttttttggtgtttaaggagtttggagtatagttggagggtgtgggggtgtgtatatgggagttggataattttgggtggatagatagatgtggggaagggatgattgaaggaggtggaggagagagtgtgatttagtttagttaggggtgatgtggataggtagtttttgaattagggtagagaaaagttattattagttagtaggggagaagttagtatggaggaggtggattttgagggagagtaggaattggattgtaagaggaaggagagttttttggttagtagtagttagtagtagtgggggaggttggaatgagttggttggagagggggttggggtataaggaggggtttgtttgtgaagattatatgggttaggttgtggagggttaggtatgtttgttgggagtgtagttggtttatgggaagtatttggagtggttgggaatgggtgtaggagtagtgttgtgggagtataggttttttttttggggtggtttatttggtgttttggtttttgtaaggtaggttgaaagggtggggaggaaattgttagttttttatagtgttgggatggtggttttagggtttttgaggttagtggatgtgggtgtttgttattatgtgggttgttgaggggtggagattttaggggttattttaaagtaggatgagttttgagttatggtatttttgggggtagttttttaattgagtagatgtttaggtttggaattttgtaatagaggttatagggttttgattagggtgttttgggaggtttagaattagtggtagtatatagggtagatggtaagtgatttggtatggggaaagaggtaggtgtttaggttggtatagtatatttgtaaggaataggtagatgggaagttgtttgtgggtttgtgtgtgtgtttggagttaaaattttgttaatgttttatgttttgggtatatttattttttttttggggagtatttttttttttattttttttttttttgtttgttttttttatttagggttttttttattttttttgttttggggattgagggtattatggttttatgttttattattgatgagttgtatagggatttagtttttttgttgtttaggttgggttttttaggtttagggtttttaggaatggagagggtattagtgttttttatggatttaaattttttgtattttgtttttgttttttttttaagataggtttttgagttttaaggttttagggttttgtggaggttgttatgtagtagtaaggagaatgttttgtatttggttgatgagatttttagagttttattttttatttttttattgtataaatgggtttttaggtgattgtagtatttgttattgtttgtaatagggtgataagagggatgattttttttttttttttttttttggttggtggaggtatggggttggtggatggtatgtgtttttgtgaatttaggttaaatttgttattgtaaatatgattataatttgggtttttgtgtaataaaagtttttttaagtattagttgttggtttgttttgtttagtggtgtttgttgtaattagatttgtatattgagaaagaatttaaaagtttttgatgtttgttgaaataatttggtttaggatttatgtgtttagattttagagttgtgtggtatttgagttttttttgagtttttattgttgtttgaggaggatttttagatttgtgttttggaggtagagtaggttgtgggatgggtttttgggtgggaaggattatgtggatatgtttttttgtttgagagttttaatatttttgggatgtgggagttggtgtgttggtaggatttaggtgttttttttttttttagagaaaaaggttttgttgtttggtaataggtgtagatttgtttttaattaatgttagtaggttttttgtgtgatgaattttgttttttagttaagatttaaggtattttgtgaatattgtttttttgtagtttgagtttttgtggtgggaggtaggagttatggggagtgggggtaggttttttatatgggttttatagttattggtagtattgatttgatgttttttgagtttagagtttagggttagatagatttattgttttgattatgagttggtttatttagaggggggtggatatagtatttaggtagtagatgtattgtgattagttttgtagtggggttgtgggttttttgggttggatgtttgggaagaggtaggtggaggtaaatgttaggatatttttgtagtgattgggtgattgtaggttggaaatgttttttgtgggttgtggttgtttaggaaggttttgaatggggttagtggatagagtttgtatttagaggggtagtgttttggaggagtgaggggtatggtagtgtagggatgtttaggttgtttttattttgttattggaaagttgggtggttttggtttttttagtttttttgtttgtttttttgtttgtaaagtggggttagaaatagttttttttgagggttgttgggggattttgagatgtagtttatggtgttgagtatgggttttgttttttatgggtgtggtgggtgttgtggttggtgtggtatttgggtgggaaaagggggtatttgtaaaggataggtaggtttggatgtttaaatatgtagatttggggatgggaggttttaggtaagggtttgtgtgatgttattgtatgaatgaggttggatagtatggttattattaattatggaaagtatggtagatattagtgttagtagtgtttgtttgggggtttttttgagtttgataggtatttaggtttttagtgtagttatgggatttttttttttttgtttggttgatattttggaggttggtgttatgttggttgtaggttttttttattgggaggttgttttggttttttttgttattatttatttttatttttattttggagtgttatagatgggtggattatatgtttatttgtagggttaagtgttgataatgaggtgagtatttgttggatgattggattatgaggatagtgggggtgttggtagtttgtgtttggttttgtaggttggtttttttttgaaaagtggttgtggtagagtgtgtattttagggagtggtgtttgttgttttgaatatttttatttagtaggtttttgtaagggtttagttaagtgtggtgtagagttgggttggtagttggaatagttttattttgtttagtggtgagattaagggttgatgggttaaggttgtgtgttgtttgtttagtttgtggatttatttattgagtatttttatatttttatattgggtttggggtgttaggaggtggaggggggattgggtgtttggaaaaataagtttattgagagtttgagtttttaggggttagtattaggtagttattatggtgtttggtatatagtggttatttggttttgttggttgttttggtggtggagagtgtgtatggtggttgtatgtgatgggtattatttagggtaatatagatatgtagattgtgtatttgtttgtaggagttagggattttttagtttggtaatttgtgatttttgtttatttgttgggagagaggtgttgttttttgatagtttggtgttgggagagtagaattagggttttttttttttttttttattttttattttttatatgtttaggtattaggggaggttatatttagggatgagttttggttattgggtttagggttttattgttgttattttttttttttgttagttagttaaatgtttgtttattattgtgttggggatggggttggtttgtttttttgaagtttttttggtgtatagtttaggttggagttttggatgattttgttatttttttttttgattttttttttttattttgatttattttagaaatttagttaaaaattaagtttttgtgtttttttttgataaagttattgaggaaaaatggttaaatattgtttttttttttaaagtttttttggttttttttaaatttggaggttttgagttgtttatgagattaaagggtttggaattttttggaatatagttttagaagtgggaggatttgttatttttttagttaaatagatttattagttggtttttagatatttttaggtgtttggggtatttttgggtttaggttgtttaatttggtttgtagagttttgaggttttgtttagattgggttagtagatagttttagagattttaagtttgttgttgtttttaaaagttttgttaatgtttagaaatttagagggataagaagatgattttgatgttagttgggattataaatagtgaggtttgtttttttttttatttatgtttgtttttattgtttttgtagttgggtttttaggggattgtttgtggttatgggggaggttgggaatgtggggtttagattttattgggttttttgtatttttttgtttttttttgtttatttttttttttggaaatttttgaatatttttttatagtttttggtattttgttatttttggtatttttgggttaattgggaaagttattatttgtttaatatttagaaaattaaggggtttggttttaaatatattgtagtgtttttttttttatatggtattgaattttttgtgtttttaaagttaggagtttgtgttttggatgtgggtgatggagttttgtagatatttggagtggtttttttgggagagttttttttgtttttttatttatttgtttttttttttttgttttaagttttggttatagttttggaggggttatttgagtgtaggttgtttttaggtgtatagttggaggggggtagttattttatatttttttgtttgttaggggtatttttagggatttaggttttgagggatagtggaagggtggggtggggagtaggttgttgttttgtgttatttgggtgttatgtagattttgaatgggtagtttttgggagttggttttttttttttattttttttatagtgttgtttttttgaggggttggagttttttggagttttttgtagtttgtggtaggtttttttgattttgtgtttggttttgtagtttttaatttatagttagtggtatgaagaatatttttggttgtttttatttgtggtttttgtaggtagtagttttttggggtagggtttgggggttttggtatttttttgtgggattttttgggtatgagggagggagttatttgggttatagatagattttttttttgtatttaggaggtttaggatggatttgttttatttttttttttggtgggaagagagtatttttggttatggggaatgtggtttggatagagttatttagtttttttttttttttaggtagggttttgaaagatggagatggttttgtttttgttaggttaatagttagtagtttggtggatttttatgtagtttaggtaggatttttttttgtttttattttttattttatgtgtaggaagttggttttaagtagggatttttggttttgttttttatgtgggtgggtagtttttttgtgaggggtaggttaggtttttgttttatgttttttagagattgatgttatttatagtaagagtatataagtttttttggttttaaattaggtttggaggggtggtttttttttttgttttttgttttttgttttttattaaaggttagggaatggagtgttttgtatgtttgttggggttgggtttttttttttggtttaaaatgaagggttggaatttttggtgtagattgtatggtgagaggtgttttttgggatttatttgaggagtattattgttgaatgttttgttaggttaggagtattgttgggggtgggagaggtagttggtttatttgtttatttaatagttatttatgggtattttaagggttagttttgttttaggtattgggggtttaggtatgggtttaggagaaggggtagaatgggagggttttttggaggaaggttttttaattagagattggggtaggagtttgttaggtaggtgatgttggttagttttttttgttattttttttttttttttttttttttttttttttttttttttttgagatagagttttgtttttgttgtttaggttgtagtgtagtggtgtgattttggtttattgtattttttgttttttgggtttaagtgatttttttgttttagttttttgagtagttgagattttaggtatgtattattatgtttagttaattttttgtatttttagtagagataaggttttattttgttggttaggttggttttaaattttttattttaggtgatttgtttattttggttttttaaagtgttgggattataggtgtgagttattgtgtttggtttttttttgttatttttgtagatttatagtgtgtgtggaagattgtatgtttgtgtttggtatagttgtttttggtatttaggtgggaggtgggggagagggttgttggtgttagtataggttatggtatgagataggtttttgtagttaagtggggtgtattgtagtattggaggggttttgttgtgtatgagatttaggttttgtatttgtttttttttttaggaggtttggagggttgggagggattagggtggtgaaataatttaggtgggagagaggtattgttggagaggtagagggagttgtaggtttgtagtagtgagttttaaattttgggtttttattagaaaattttagaaagggttgttttgtttttttttttaaattataaaagaaatttttggttgtttgggttttttggggttgggtgggggaggagattttttatttgtatttttgtaggtttagtattgtgtagagggaggagggtggaggtaaaggtgagggaggagggtggaagtaaaggtggggtttttttttagttttgttgttttgtttggttgttgtttttagatttttatttttggtttggaaatatggaattttgggatagttggggtagggggtatagaatggagattttggtgagggaggaattttttttttagttttggttgtggttatagtaaggttaggttgggaggattttatttaaatatttatattttttttaatatttaaatgatgaagtaggtttttgtatatagttgttttggagttagttgttgtttgttttatttttttttttttttttttttttttttttttttttttttttttttttttttttttttttttttttttttttttttgtattttttgtttttgatttaagtttaggtttttttagttgttttttttttatttataggtattttttgtgattgagtttttttttgttattttttataattattttttttaattgagtattttttaggtgttaggttttgggttggtattttgtatataaggtgttttttaatttttatgagagtttaataaggtagattgggttgttgaggttttagtgttggaaggttggtttgggtttttttagtttgtatttgtatttatttattatttttttattgtggagatttgttttttggtttttggttgagtatgatggaaatttttgtttattagtttttggagagtggggatggttgagggttttgattttggggtttgatgggggttgtttttgttttattttagtttggttgtttttttatttaatgattgagtttgtaaaattagaataatagtgttatttggttggtattttgggtggttgggaggtgtgggagagggtgtatggaggggttgagtgaggtgttagtattgtggggatttttgagggtagtttttttaggtttagggtggagtgtaggtagagggtgtgatggtttagtgtgttggtttatatttggttttgtttttgtttatatggtaatgtgggggagttattagttttttagtgttttagttttttatttgtgtaatggggataagagtaaattattgtttttaggtatggtaagtatttatatatattgattattgtagaatgaatatagtgagttttttttaggtttttattatatgttaggtagggtgttaggttttagtggagaggggataatgatgggtaagttggtttttgtttttaagggttgttgagtagggaggaaggtggtggttgttttgattgtgatttggagtggggtgatttgtaaagaggttggtgggaggttggttgggggttggttgggggttgtttttttttttgtttgtgttttgtggtagggtattaaattggttttttttatggatttttgaggttttgattgtgggattttgggtaggttttgggattttgtgattttgtttttgtttgttatttaggtttttgtttttagtagtgtttagtatatggtgatttttgtatgttttttagtgtgtgattgattttggagttgagatttggtagttgaggttggatattgtttttggataatttttggggaggtgggggtagggtggggttgtgagttggtaattttgagtttttagtagtttttgaatggaggttttttttttgtaggatttttggggaggaaggaggggatgggggagatgaggtttgtgagtttttaggagggtagaggtttatatttgtagtgttttagaaatattttggggtgtttaggtttatttagtttttttgagttagaattattaagagttggggattagtagtttattttttagtaagatttagaaatgatttttttgaatagtttgagttaagaatgatatatttggaattagaatattagaattatagaggaattgagagaatgggtttaaaatgtgtagggattttagttatatggtgttatatggaggaaagtatttaatattattattgtatgaatttgtttaaatatatatatatatatatatatatatatatatatatatatatatattttttagtaaagagtggaaagatatttgttagaatattgatggaagttatttgggttgtgggtttatagattttttttttttgtttttgtgtattttgtaaatttttggttttgtgtttaaattttttttatagttaggaataaagtaatagatgttattttttaaagtttatgggtttgtgtttgtaattttaatattttgggaggttgaggtaggaggattttttaagtttaggagtttgagattagtttgggtaatatagggagatttttatttttttttttttttttttttgatagagttttattgtgttttaggttgaagtggtggtggtatgtttttggtttattgtaatttttgttttttaggtttaggtgatttttatgttttagttttttgagtagttggattatagatatttatatttgtaggatttgagaattttataagaggaaagtttttatttggaggttgttggggatttggagttgttagtttatatattttttagtagagatagggttttattatgttgattaggttggttttaaatttttgtttttaagtgatttatttattttggttttttaaggttttaggattataggtgtgagttattgtgtttggttatgggagatttttttttaaaataagaataaaaataaaaataaataaaagtttattgttaaaaagaaaaatatattatttaatttaatttttttttaggattgagagatgaggaagtagaggttggaaagtgttatattttttggttgttggtagttaggggatttgaggtttgggttggtttttttgtgttttaggtttggggtgttaggtggagtttttgttttgtttaaaggtttaggtgtttttgttagtattgtttgtttttgtatttttggttataaggaatgtgggttaaaggtagggtttttgatttttgtttaggagggtgaagtgggttggttttttttgtttttgttttaaggtttttgtggttgtgtttttggaaattgttggtttgagttagtgtgtggagttgggatagattttattgtggtttttgtggggttattttatgtttgggttggaagggattttttggtttagttttttttgttttttattaggaaattgagattagagaggttatttgtttggtttggggtggggtgtagatggtgtttgtgatttttgtatgttatgtgtagatagttttttagttgtgggttttttatgtaagtagttatgttggggataatttggttgaaatttgtgatttaatgaagagaagaatgattttttttgtagttttgtgttttataggtttttttttgtttttattttttttgtagaggggttttatgttggtgggtgggtttttgttgttgtaatgggtttaggtagtttttgggtagtggaggtttggttgtttttttgtttaatgttttttgtagtttatgttgtttgggaagggtggggaagtatttagttattggggattttataagatgggtatttgggagatgttgattggtaggttaggtttttgtggtttataggtaggttagaggttatagtgttgagttgggttgagttggtagtttagggtagtgggggtgggggtattttgtttagttatgggtttttttggtataagggtttggagtttattgtaaataatttttttagttttttttttttttataggttattagtagaattgaggggttttttgttgatgaggtgtggtttgggaggggttagttgtttgtttatttgatttttgtggataggtgattataggttttttgttttagggggttgggggaaagattggggaggtttttttggtttttttatttggaaggaaaatatgggtataggggagatattttatagggatatattttagttagtattttttggttgtgttgggggtatagtgtttgttttgtttataagaggggttagttttttttaggatttaattttagtttttagtgtagggtagatgagtatttagaggtttagaggatttatattatgagagagaagttgtgattatataggtattgaaggttaagtagaagagtgggatatatgggtgatttgaaagttttagggttagtgtggttagttttagatagttggggagttttgggtattaggtttagtaggggaggagggtttttgtgatagtttgttggggttgttgtaataaagttttatgaattttgggggttgaagatggttttagaggttagaagtttaaaattaaggtgttgattaggttgattttttggggtttttgtgggaggttttggtttaggttttttttttagtttttggtggtttttgggtgtttttgggtatgtagatgtgttatgttattttttgttttgtttttatatggttttttttttgtgtttttgtgttttgtaaggatgtttgttattgtatttagagtttattttaaatttaggatattttttttttgagattttttattgtatttgtaaagattttattttaatttttgttatatttataggtttgagggttagggttttggtatgttttttgggggttattatttagtttattgtggtagttgattttaggggaagtagaatgttttaagtttggggtgagtggagggaatgttgttgggtggggagtgggagattaggtttggagatattgtggattttttttgtttgatgagggtgtgatgaggtttttattttaggttttttgaatggtggttgtttttgaggagatttttttttttggatttgtttttttagaaatttttatttaggtttaggttttaaggtggatggtaagaggtggttgtttttgttatatttgatgggtgagtgtgtgaatggggttgggagtaggatatttgttatttttgtggatagattttagaggtttatgaatttgttgttggggaaggtgtttgatttagtttgattttttatttttatttttttttttttgtttttttttattagttttgtttttagagttttatttttttaaaggtaggtgttgttttttggattttttagtagttattttttattttagattttttttttgtaggtttttttggttttagtgtttatttttttttgggtttttgtttttttattgtgaggtttttgggtagaagtgtggggtttttttgttgtgtttggtttttgtggtatattaggggtttttttaggggtttgttttgtttgttaggtttttagggagttttttaagtttttagatgggtttgatggagttttttaatgtgttgttttagagtaggaggggttttggttgagtttgagagtttttttagttatattttgggttgtttggggtagttaggtagtttgttttttggaggtgttgtttttttttggttattttttttggaattttttgtgtttagttgtggttttttttatatagtatatttattatttttttttatttgtgatttttttttgttaatttttttatgtttttgagaatggagattaggttttttttattttggagtttagtagaatttaaattaggtagatttgtgtaggtttatgtgggggttttgtggttattgtggttttgttgttatttttagtttagtttggtgtgttttggattatgttatttagtgttggttttttaaattttttttttggttttgtaggtttgggaagtagttggtttttgggtgtagttgtgattggagtttgaattttgttttttggggttattgttttttgtaattaggttgtagtttatattggtttgggtagaggttattggttgtttgttttggggttataatatagagagttttgtgattaatggaggttttatttgggttaagtggtttttggtgttaggtgtttttttttttttttttttttttttgtattttttaagtgtttgtaatattttttttaatggataatgagatgaggagggagggaggggtggtttttttgtttaggtagattaggaatggttattgtttgtgtgtgtagtgataggtttgggaatagataagggagagtttgtttgggaggttggatttttatattgatgttgtttgtgtttggtagttttgttttgggttttagaatagatattgattaatatgttttttagggtttttaggtttgggttttggtttttggtagagttttttatttatgggaagaagtattgagtagttttgttggttttttgtagggagttgggatgtatttttaagagtagtatgtgtgaagtttggggtttgggtaaaggagtgtttggggaagagtttgttgttgttggagggttggaagtagaggggaaggaggggtatgtggtaggttgaggaggtggttggtgattttgtggtggggatgagggggttatgagtagattaggagttagtattatgtttttttgtttttagaattgaggatggagagttgttagagaggttttggtggggtgtttggggttatttaaagggtgtgggtggattaaagttgaggaaagttttattttgggggattttgtatttaatttttgaggtttttagagttgtagtttgtggttttttgaagttaattattttttagggttttgtttttgtttttagtgatagttatttattagggagtttttgatttaaggagatttgaaaggttatttggttttttttttatttttaggtaggttatatttagatttttttatatagatttgttttatttttttgttgttttttattagggatggagggtgggtggtttttttatttaggttttggtggttttattttagttaggaaattttttttttttatttgttttatatttttttttttgtggtttttgtttatttttttttaatttgtttttagtggagtagttagtagttggtttagaatttgggggtggggggagtgttagattagtgtagtatatttgagagtgtgttagaggtgtttttatttttatagttgatttagtaaagaaaagaggaagtttagtaatttagtgttattttaaagtttgtttggaatgattttgtggttgttggaattaggggtatgtggtagatgatgggagtaggtatagagaggtttttgttttggattagttgttgttgtttttttggaggttgggttgttttttaagaagaggatttaaggttttgtgagtggtggttttttttggagtttttattgtggttttggttttgttttgtgtaaagagagatggtttgaagtagaagttgttatgtggttgttttaggtaggtgtttgtagttttagttatttgggaggtggaggtaggagaatggtatgaatttgggaggtggagtttgtagtgagtagagatggtattattgtattgtagtttgggtgatagagtaagattttgttttaaaaaaaaaaaaaaaaaaaaggagtagagaaattttttttagaaggtttgtagttattttttttttatgttttagaggtaaaaaaaaaaaaaattgtatattttgttttttttttttttttttgagatggagttttgttttgttgtttaggttggagtgtagtggtgtgattttggtttgttgtaagttttgttttttgggtttatgttatttttttgttttagttttttgagtagttgggattataggtgtttgttattatgtttggttaattttttgtgtttttagtagagatggggttttattgtgttagttaggatggttttgattttttgattttgtgatttgtttgtttttgttttttaaagtgttgggattataggtgtgagttgttgtgtttggttatatgtttttgtttttgaataggtggttttttgattttgggtgtggttattttaagattttgttttggtggggtataattttggttttaggtagggtgattgtataatttattgttttttgggggatatgttagtgaaagggatttttgaatgattatggtgggataatagatgtgagttgggtttgttttaggaaggttggatgtatgggttttttgagttagaggagataatagtagaaagttttgtggttgatgggattgagtaggagaagggttggtggaggttggggtaataatgtatttgtttattgtgaagggtttgtgtgagttgatggttgatgagagggtagtggggtgaggttgttttttgttaggttagattagttttaggatatttatattttttttttagaattggtgatttagtggttagaaggggttttagaattgatgggatattgagggagttgaatggaatggttggagtggttatagtaggttttaggtttttttttgttttttttttgtgttttgtttttggggtttatattttggggttgttgtaatagagtgttataatttgggggtttataaatatagtttttggtggtttttggagatttttggtgttttttggtttgtagatgtattattattatttttgatttttggtttttgtttttatgtggttttttttttttgtttgtgtgtttttttttttttttgttttttataaagatgtttattattggatttagggtttattaaatttagaatgattttattttgagatttttattttaattatatttgtaaagatttgttttttaaatgtgattatgtttgtaggttttaggagttaggatttaagatatattgttttgggggatattgttgaatttattatatttaataaatttagagttggtgttaatgttttttgtggatattatagtagattttggaggttttttgtaaaggaatttgtaggatttttttttttttttggagggatgagattgtagttgggttggggaaagttgttggtttaagttggggttggtttagttggtgttggtttgttaggttgttagagagttttatttagggagaaattaatattataaagttgggggataagagaaggtttggaattttaagggttggttgttgaggttagttgtttatttttttgtgttttattttatagggatttaggtttgttagtgttttgtttttggaaggaatgttgtgggttgttgtgttttataggtagggtggagggtttttttgtagttagtgagttgttttttttgtagtgtgtagagggaaggaggaggtttgtttattttttttggttttagttgaaaatttaattataggttttggtattaggtagatttgtttatttttatattattattgtagagtgagttaggttttttgggtggggttgtgatgagtaggaaggatttttggagtgtttgggattttttgggtttagggttgttagaggtagagagaaagaagtttttttttaatatttgagtaaagatagttattagaatttattagagtggttttttgtggtttttttttgggtgttgatttttttggtgtatttgaagtttttagggatattattgatgttttttgtatttttatttaggggttagtggaaatggttttttttttttttgtttagaggtattgtggatgatgattttaggttttagattttagttattgggttatgtgtgtagataagtttgggtagttagtaatttttggttattaagttggttttttgtggattgggttggtattggaggtgggttttagttgttagtattgtggtttagttaggtttggttttgggaaggtagagggggaggggattgggaaagggattgagttgggggtggggtggtattttggttttttttttttagatttttggtaggtttgaattatttggttgtggttttttaaggagggagtgttttttttgttttgatgtggattttgttttttgtttatgttgtttttgtttttaaataaatgtggttttttgtggggagtttgggggttgttttttattgatattgttgttttttggtttttttttgtaggttttgtttagttttattgtgtttatttttaagtttttttttttggatggttttgttttttgagaatatatttttttttattattttaattgtgtttttttttttatttggagtttgttttatttgttttaggagttattttttttttttattaagtagtttaggttaattttggagggttaatttgtgtttttttagaagtaggttttgagatagggattttagtgggaggggatattaggggatgtttgagtgtgggaatgggttaggtagggaatttagttaataaagggtgttttattagtttattgtgattataggtggttgtttagtttttatattgggtagtatggggagattgtagattgtgtttttagttttgttttatttggggttgggtaagggagttggggtttttatattttagtttttggttaaggattgtattgtttattttttttagttttttgagggtttgggtattaggaaaggttttgggtggagatatggaaataggttatgtgaagttagtgggtgtgattggtagtagtaaggttaggatagttttggttattagtaaggtgattatatattttagtatgtatagtttttatagatatatatttaggagatggtaattatattagtaatagttatttttgttgtgtgttatgtttgtatttagggaattttattttttatttatttatttatttttatttgagatggagttgtgtttttgttgtttaggatagagtgtaatggtataattttggtttattataatttttgttttttgggtttaagttattttgttttagttttttgagtagttgggattataggtatgtattattatgtttgattatttttgtatttttagtagagatggggtttttttattttggttaggttggttttgaatttttgattttaggtgatttatttattttagttttttaaagtgttaggattataggtatgagttattgtgtttggttttaggggtattttattattttattattttttatagtaggtgatattgaggatattgaggtttagagtagattgtggttatgttatttttttgtttggtttttttgtttttagttttgaaataaagagtatggtttttgtgtaggtttatatgttttgtttttagttttggagtagtttttaagttttttgaaggtatattaggtttttgggttttgttttttaagttttggataaataggaggtgaaggagtttttgtaattggattttattttgttagtgttaaggttttgtttgattatttattttattttatatagattagggatttgtgttaaggtttagtgttataggagagtgaagataaggaggtgtttatggtgtatatgttgttggatttattttgtagattttaagggttatggggagttatttgttaggtgaggtttttttgtggtttttttttgtaggtttagggtagtatatagggaggtgtttttttattttttggtattatttgtttggtttttttgagttttgattttggtttttagatagttagtgtttttttagggatagaatttgttttgttgttgtttagaggagatttagtttgattagggttagtgtttttggaatttgagtttggaattttattttgttttgggtagaggttatgttgtttttttttatgagagttgagttgtgtatgagattattttgattttgggttttattatttttttgtatgatatttgttttaggttggagtagggttttgtggtttgtttggtgttttttttttagattgaggtttgatatgtatattaggaagtgtttgatttggttttaggagttgggagtggtttgttaggtagtttgtggttagagtaggggttttaataatggttttttgtgtggtatatttttttttaaataggtttaggtttaggttgtttttgttttgattttgttatgggtttggaggggaaagtttgtatttggagggtggtttattgtggtttttttttgtgtagtagttgagattgtaggtgtttgagaataggagaagttttgtgtttattttgggttgtgagatgtttttttagaggtggggatggggatgggttagtatgtagttatttatattttttagtttgttggtattaaggtttgtgtatgtgtgtgtttttttttttttaattttgtttttttaatatggagttttgttatttgtttaggttggttttggatttttggtttaagtgattttttagttttaggtttttaaagtgttgggattataggtgtgagttattatgtttagttagtattaaggtgtgttttttaagagtaatattggttgggtgtagtggtttatgtttgtaattgtagtattttgggaggttgaggtaggtggattatgaggttagtagattgagattattttggttaatatggtgaaattgtgtttttattaaaaatataaaaaaattagttagatgtggtggttgggtatttgtagttttagttatttgggaggttgaggtaggagaatggtgtgaatttgggaggtggagtttgtggtgagttgagattgtgttattgtattttagtttgggtgatagagtgagattgttttaaaaaaaaaaaaaaaaaagaataatattgatggttttattttttgaatatgttaagtgatttttatgtagtataagtattttagaaggtaggaaaatgtaatgaataatatttattgttatttattttatttagagattgttattttttgtttgggtgtgagtgtgtgtgtgtgtgtaaattgtatatgtgtgtatgaaatggaattaggatttttgtatatattttgtgttttgttatttttatttaatatttttggtattttttatttttaaaaatgtgattttaatgatggtgtaggtttttgatatatgggtttagaaaatttgtggaaatttggattgtttttaggttttgttagtttaatgttgatgtaaatgtttttgtatgtaaatttttttgtatttttgattatttttttgggataaatttttagaagtgggttaaagtatatgaatggtttttaggtttttggagtaagttgagattggtggggattggagaagggatttagggaggtttttgggagtttgtgagattggagtttggttttaggggatttgaatttatagatgaaggagatggttggtaaaggtgggaattttttgttttatgggtgggggggtgatattgttttattttttagtgatagtatggggatttttttaatatgatttggttttgtatttttttgatattgtgtatggtttatagttgtgatgtttagttgggagttttttttgtgttttttagttgtattaattttttgtagatagaggaggaagttgtttggtgtttttttttgttgtgtgggttttttgaatttgtttagttgggtttgtggatttgtgtagttatgtatggggttttaaaatttgtaaaatgataagtttatgaatatttttgtttttgtgggtgaatgtggatattttttggttgtgtttttttttatagggaagatggagatgtgtaaagtgataaggatttgttatttttgggtaggttatgttggttttattgtgaggatggtggtagggggttttttaggaggtttgtatattgggaagagaggggtgattgtgtgtgattgtaggatttagggtgtagttttaggattttgatgggggaggagatgttggggagttttgttttgttagtttggtgatagatattttttaatgttttttggttgggtataatttataatgttttttgtggggaggtaattgtttatgaggtatttttggtagggatgattttgttttattgttatatattttagtaatgaaataagaatttagagtgatgtgatttttttgatgatttttttaattatttggggtttttgtgtgattttaagaagggggaaggaggtagtttttgtttttttgggtttttgatgtggtagttttggaatggttatgtgtttgttggtttatagtgggttatttgttgaatgtggttgtggtgggattggggttgggttggagagtgggtgattatattagttagttttattttgggttattgtgtagttaggggttttatttttttaggggttttgttgtgagtgttttggggttgttggaataaattattggaaattaagtggtttaataaagattgatttgtttatggttttggaggttataagtttgatattaaggtattggtaggattatattttttttgatagtttgaggggaggatttttttttgttttttttagtttgtgttggtttaggtgttttttggttttggtagtatttgtagtttttgtttttattatgtagttttttttattgtgtttttttgtgttttaagtttttttttgttttttttttataaggatattgagtattggatttagagtttattttaaatttaggatagttttattttgggatttttaattatatttgtaaagattttttttttaaataaggttatatttgtgggtttttggggttaggtattagatatgtttttttgggggttattagttaattttttatagaattttagatgaaagtgaatttttataggttgaaatgggggtgaaggtttagtgtgttttttttttttgggagtttttttagggtttgtgtttattttgtgattttgtgatttagttttttttttgagatgaagttttgttttgttgtttaggttggagtattgtggtatgatttgggtttattgtaatttttgttttttgaatttaagtgatttttttgttttagttttttaagtagttgggattataggtgtttatttttatgtttagttaattttttgtgtttttagtagagatagggttttattatgttggttaggttggttttgaatttttgattttaggtgatttgtttgttttgggtttgttttggttttttaaagtgttgggattataggtatgagttattatgtttggtatttagtaggttttggttgttttttttttttgagatagagttttattttgttatttaggttggagtgtagtggtgtgattatggtttattgtagttttgattttttggttttaagtgatttttttattttagttttttgagtagttgggattataggtatatgttattatttttggttaatttttgtattgtttagtggagttggggttttgttatgttgtttaggtttgttttgaatttttgggtttaagtgatttgtttattttggttttttaaagtgttggggttataggtgtgagttattatgtttggtttagtaggttttttagaagtgtttgaggtttggtgaaggtatggtgttatggagtagagaatatttaattttgtttttggggagttggaatatattttttgtagttaattttaatagttatgatgtggttaggatgatatggggagggggtggtgtggattgtgtgggaggttagttttttgggaagggggttggagtgggtttggttttgaggaggatttttaagaggaggaggaggtggtggtatgtttgtttggggggatggtgtgagttagggtgggtatttttttatttaggtgttatttttttgatattttagttgggatatggtttttttggggaagatggatatttttagagtggggtattttttggggaagatggatatttttggaatggggtgttttttgtttttattgtttttttagtatatagttgtatttttttgtagttttggaggttgtgagattttttggttgttatttagaataaatttgtttttgagtagtgttgttttgatggtggggtggtttttgtgggtggaatagtttttgttgttttagagtttattgagagttagtgggtatgggagtggtgttggattgaaatatttagagggattatagagttaggtagtaagtatagaggttagttagtggggagggagggatttatttatgaaaagatattaagtattgaaagagaggagaggatggttggggattggtatatatgtgtattttgtgtagatggttaaggtggtgaggtgttagttatgtagataattggaggaaggaggagtgttttaggggaggggttagttttggttttagaatgatttgtttgtgtatgtgggtttggttggaataaattattgtatttgtattgtagatttaattgtaagtttatattagggtagtttttgttttggtgtagtgtttttgattatgagttggttatggtgggggtgattttaaggggatttttaaggagggggtttattggattttttagggaaggttatttgtttttttgggttggatttgggataaggtttttttttgtttagtttttgttttttaatttgattgtatggaaggatgttgaggatatttggaagttggtttttgttttatagtatttataggatagaggtatattatgtggggatagtttggatagtgtttaggaggtagggagtagattagaggattgtgggaggttttgggaattgtatgaggatttaggtattgagttttgtattttttggtattagtttgatgtatagtttggttttgtgtttattttgtattttattttttttatttgtatgggggtggtaataatattttttatagtttaggtttaagtgggtgtagatgtgatgagtttggtaagtttattttattatatttagttttgggtattgaattttggattttttggttggtagaagtggatatttaatttttttttggggttttggggtttttgtagaattagaatatagttagtagtttgtatgtagggtgtagagggatagagggatattatgttgggagtttatatttggtatatttttgattttggggtttagtgttttgttgttttgtggttatgtgattagttagaggttatggttggatttataggtgaatatagtttgtggatttgattttgtttggttttgtggtgttttattttatttttagttttagtttgtggagatagagttttgttttgttagttaggttgagtgtagtgatatgattttagttttgtaatttttgttttttgggtttaagtgatttttttgttttagttttttgagtagttgggattataggtgagtgttattatgtttagttaattttttatttttagtaaagatggggttttattatattagttaggttgtttagtgttttaaaaagggtttgttttgttttgtgttagtatttaaagattaggagatattatataaagatttagatttttatttttttgagaagtgaatagttttggttatgttgggtttatattttttagggtagtgatggagttgagatagggtttgtgataattgagagttttttggagtttatatggttttttgtttagtttttggtggaggttgagtttagtgatttaggattttgtttgtgtttattaagaaggagaggtgtttgtggtttagagagggtgtttataggagtgttttgtttaggaagttggtagttgaggtggttagggttagggggttgggttttttttttttttttttagtgtttgagtgtatttggaggaagagagatgggtgaggggaaggtattgaaattggttttggagtgttattattgggggttggggattagttgttatttttttttttgtgggtaggggaggtagtggtgggattttatgagatttggattttgtggtttggtgaggtagggagtggttggggagatattgtgggtttttataggggtgtgttgtgggtttggtttggggaaggagttggtgaatgtgtttgttatgtgggtttttttttgttttggttttgataattaggagtggttggtttttatttggagtgtggttgtggggattgtggaggtggtagttttttaggtattatttttattgtttttgagggagtagattttggtggagaggtaggatggttgtagggtgggagttggtggttggtattattgtatgggtttgtagtagtggatgggaagatgtaggagaggttgatgattgagaaagttggtttttgtggattaagttgggggagttggataattaagtggttagaattttgggttttggtattagtttgatgtatagtttggttttgtgtttattttgtgttttattttttttatttgtattgggggtattggtattttttatattttagggttaagtggttgtagatgtgatgagtttggtaggtttggtgttttgttggtattgaaagttttagtgtttgtttttagtgttattgatggggttttgtttttgttgtggttttgattggttatagttgtggttatttattattggaggtatgttttttgttgtggttgatggtagaggtgtgtttgttggtggtgttttagtgtgtgttttggttggaggtgaggagggataaaaatagttgtgataagaaggaaattaaggttgggtatggtggtgtatgtttgtaattttagtattttgggaggttgaggtgggtggattgtttgaggttaggagtttgagattagattgattaatatggtgaaattttatttttattaaaaatataaaaattagttaggtatggtggtttgtgtttataattttagttattggggaggttgaggtaggagaattgtttgaatttgggaggtgttgttgtattttagttagggtaatagagtaagattttattttaaaaaaaaaaagaaggaaataaaagttttttttggaattagaatgtttttatgtagatgtagttggagggggaggttgtgtggtttgtgttgtggttatggtaagatatgatgggtagtatttttttattttagtttgtatttttgttttagaatttatgatggtttttttaggatggggttgttttttttgtttgttgagatatgaaggatgggaagagatttttggtttttattgttgtattgtttgtttttttttgttgttttttagtaggaaatatgttggagtgttttttagttatttatttattaattgtattttttttttttattttttagttttgaaaagattttttgaggttgaggaggttgagatatttaattttattttattttggagggtttagatttttttattttgagttattgtggttagttttatttagaaattttaggatttgggtgtgaagaatttagaatttttggtttgttatgtggattttttaagttaatgtttttttaaggtgtttttgtggagggtggagtttttgggttttaaggtggttgagttggtgttttggtgtattgagttgtttattgatattttgtttaagtaggtggagaatgttggggttattggtttgttttggtttgggtttaagagggttgaggtgttgggttataagatgttagaattggttttttggaggatggagattattattgttaaattttaggagttagtttattggaggatggagttttttgtttttaaggtttttgaggtgtttattgtttttgttattgatgtagtttttaagagggtggagatttagatgtttaagtttgttgaggtgtttattgtttttagtttagtttagattttggagaatttagagtttgtttttgtgttttagttgtagagtaggttggagtttaagttttagttttttgtggttgaggttatattttggagttaggagggtgagttgtagagtgttaggttttggatgttgtggtaatggggggtttggttgttggttttgttatagaattttggaggaagaagttggatatggggtggagggtgttattttggagatttagaaagattggaatgtatgggggtgggggtttgtaagtttaggagaggtggttttttttgtttgatgggaatatgttaagatgttttaagtgggatttgaatgagagtttggaaagattttttgggttttaaggagttttttttatgggttattgtgggttttgttgggatttttgtttgttgtgtgtttttggagggtttgggaggtttagagaatgaggagttatgtaggaattagggtaggtttatgtaggggtgtaggatagggtggagttgagatttttagaagggttgttatattttggtggtttttgtttgaggaattgtaggttgtttggatatgtttagtagaggttgagggtttggggaagggaggagggatgtatgttttttgaggtttgtattggagtttatggtttggttttttttttttaggagggatggttgtggtagagggaggggaatatgaggagtattttagtttgtaggataaaatttttagggtattgggaaggggtgtttggattagggggttgtgtgatagttgtatatggttttatttgggggtgtttttttggtgagaggagagaggttatggggttttagtagtgttttgggagggtttaagtttatagttgtgttgatatggagtttataggtaggggattggtgttagttttgtgggatatagggtttgtttggaaatgttaggttgtgggatatggttgggtttttttttagaagtgtgttttttggttttagtagggattgtggttttatggggttatagtaaggtgttagttgggttagaagttttttaagagttaggtttgattttgggtataggattagaatttagtaatgtttagtaagttttttttaggttggataaatagtatagtttgggtttttgatttagttgttgttttttatttttaattgtggtgaaatatataatatataatgtgtaattttagttattttgtagtgtatgttttagtggtatttagtatatttatggtgttgtgtagttgttattgttgtttatttttggtattttttttatttttttaaattgagttttgtttttgttagattaagttttttatgttttttttttagttgttggtagttattattttattttttgtttttattatgaatttatttgattattttaggaattttgtgtgtgtggaaaaatataataattgtttattttgtgtttggtttattttatttagtatgatgttttaaaggtttatttgttgtgttgtagtatggggtagaatttttttttttttagaggttgaataatattttgttgtgtgatgtatttgtgttgtgtagttgtttttttattggtggatttttgggttgtttttatatttttttaagtttttttttttattttttttgatttttttttgatttttttgagatagggttttgttttgttttttaggttggtgtgtagtggtgtgattattgtttattgtaatttttgttttttgggtttaagtgattttttagttttagttttttaagtatttaggattataggttgtgtgttattatgtttggttaatttttaaattttttttgtagagataggtttttattaggttgtttaggttggttttaaatttttgggtttaaatgagttttttgttttggttttttaaagtgttgggattataggtatgagttatttaatttttttttggtttttttttttgaatgagagttttttagtggttagtgggtttgggggttgggaggatgtggggtttggagagggtgtgggtttggggggagattagtgttttttatgtttttatgggtatgtggagtgtatatttgttttggtgggtttggggtttgggattttgtattttttatagagggggtattggaatatattgagtagttagaggttagtgggttttggaaggttttttttggtttttagtgtgtgagttttgtgtttttttttttatttttttaagtttgattttgaagagttattttgttttagttatttagatttagtgatagtggttgttggtggtatggtgttaggttaaaggtatgggtagtttgtagagtggtaggaggttgtttttttttttgttttttgttggtgtaggatttttgtttgatgtgttggatatatttttattttgggttgatgtgtttatatttagttgagttaaataggatgtggttggggaggtggttgttattgagttatttaaattttggtgatggttggtgttggatgtatagggatgtggttttggttttgggggataggtagggggatgtttatggggatgtataagaatatttttttttaggggtagatatagtttagtttttaaattgtgttagagattgtgttgggagttaggtttagggatataatttgtgggttttgttttttggagtttattgagttgtgagtaggatggttgggatataaggagtgtttagggagtttttttagtagtggaagtataattttattaggttaggaaggggagagaaaggtaggttatgtggaggtagtagtgtttagagttgttaggaatttggtgttttggggggatggtggttttttttatggaataggatgtatatgttggagttggggtatgggagaaaattattagtattttagatttggttatttatggatagggatttgtgtaggtgggagtttagtttatgtggagaggtttgtgggttgggttgatagttttgagggtttaagtaagtttaggtggaggaaatgtagggatagatgagggtagggtttttttaatggaggagtgtttttgaaatttgatgggagtggttttttggggggtttaggtttgagttttattagttttttttttgaggtattatttgtttgtttttttgttttttttttttgtgttatgattgttttggatatggatttagttttttttaatttagttttttgtttattttttttttaggtttatttttttttgtttttttatgtggggttgggttgggagttttttgagttttgatatgtatagttttgattaatttttgtggtttttttgttttttgagtattagggatttagttggtattatggggaaaggaattatggagggagttttgtgttttttgagtagatgtttagttttttggtttttgtttgtgggagggtatttgtgttgtggtttgtttttattttagagttgtgggtgtagggtagggttttttggggttttagttgaattgtttttagattgatttttttaaagtatagtattgttgagatttttttttgtgttgagttttttttgtttatttattataggtttttttatggttgatttatttttttgtttagtttatattttttttttttttagttttttttgttttggtttttttttggttttttatatttttttttataatttttttgttttgattttttgaattttgatttttgtttttttttatattattgttttggtgaatttttatgtattttttaaaatttggtttaaatattttgtgtttggtttgggatataaatgatttgtgtataaatttttttttttttgttagatttttttttttaaatgtgaaagtagttttttagattataaaaagtaattgagtattttttttttaaaatgtaggaagtatagaaatgagaaagaatttaaaatttatttgtaagttagtgatatttatgtttgaggttttgttgtatagtttttaaaattttttttatgtttttattagattttgagggtagggttgttgtttttgtttttttttgtgttttttttttgttttttgttttttgagatggagtttttttttattatttaggttggagtgtagtggtatgattttagtttattgtaatttttgttttttaggtttaagtgatttttttgttttagttttttgagtagttgggattataggtgtgggttattatgtttggttaatttttgtatttttagtagagatggggttttattatataggttaggttggttttgaatttttgattttgtgatttatttattttagtttttttgattttttaaagtgttgggattatgttattgtgtttagtttgttttggtttttataaagaattttataaggggttaggtgtagtggtttatgtttgtaaatttagtattttggaggttgaagtaggtagattgtttgagtttaggagtttgggattagtttgggtaatatagagaaattttatttttataaaaaatataaaaaattagttaggtatgatagtatgtgtttgtagttttagttattggggaggttgaggtgggaggattatttaagtatgggaggttgaggttgtggtgagttgagattgtgttattgtattttagtttaggagatagagtgagattttgttttaaaaaaaaaaaaaaaaaaaaaaaaaattttataagatattaagtaagtgatttggatataataggtgtgttatgaaattatgttgaaggagtgagttattggtggtgagttgggatggtttttttgtggtttttgtaggtagatgtagtgatttttatgggttgtttttagagattaagtagaaatttttttggttaattttatttttaggatatttggttttttttttggaggttgtgttggagggtttagtgggtgggtgttggttttagtgtgggggttttggaaggagttagtattttaggagggagtgtgggtatttagatggttgaaggggagggagaggaagagaggtgttgtagagggtagaggtatttttgtttgtttttttgttttagggtttggtgaggtttgagttttatgttggtggggtggatttttggtttttgaggttttggttttgtttttggatttggtattttttttgttgtttttttatagaagggtgtttattttttggggttatttttggtttttttaggttttgggtggggatggttttgtttttttttttggatttttgttttttttttgttttttaatatgggtgtttttgggtggagtggggtggggttgggttgtagtatttagtattgagtttgtaagggttggttgttggtttagagttttttttattagagttatttttttttggttttttagttatattagttaagtttttttagagttgttttataaggtgggtgtttagtgtttgtttatgggtttggttttttgtttttttgggatgtttattgggggtaagagggaggttaggtttagtgtttagtttagttttgggtatgttttagttttgttttatgagttaattggttttgaattattattttattttttttagttttaattttttgatttgttaaagaggtatttgtagaggtggttgggggttgagtttttatgtatttatttattttaagaattaagaagggagtttatagtggttttggggttatttgtgaatatggatgtgaaattggggtggggtagatatggtagtatgttttagtagtttttttgtgatttagagggtttggaaatttttgttatgtgggtggagtgttgagggagtagggggttaggtttttttgagttgatgatggtgggtgtggttttttgtatatttggtttgtattgggttgtgtgttttaggggtagaatagggaggaattttagtatagatagtagggttgttagtatagtgttgagtatagggttaattaaagtatagggttttttggaattatttaatatagagtagtgaagaggtggttttggggaaagtggggttagagttgagtttgagtggggggtggggagggtgggtattagtttgtaagggagggatatttattgggttttagaagtttttggtggggattagggattgtgaagttggggagagggtgattattgtgatttagggaggaagggttttatagatagtttagtttttggttttgtgtttataggatattttatataggttttgagtttatttttggattgtggattttttgaggtagggtgtgtaggtttgtttagtattaggtgtaaggtagggggttttggtaagtgttgagggatttattggtgtttgatgaagtagtgagtttggattgtgttatgttttgggttttgagtttgtaggatttttttgtggggttgtgtgtttttgtttttggaggtgtttagaaggtattgatgtttttgttgggatgttttatttggaaggttttgttgtttttatttttttttatttttttgagttgtttgtagagggtatttaggtttttttttattttgggattgggtttttttttttttttttttttaagaataagtattttttttttttgaattgtttttggagttttttagatttaggtttagagtgggaagttttgtatgtgttgggggaataggaattaatgtgggaggattggttaggtttggtgtgttttttttgtggtgggatggggtggggttagagaatagagtttggttttagagtttaggaagagaatttttttttttgttggtttgttaagtattgtgtagtggtgagaggaaaggagggttggtttgggaatgtagtgggtgttgagtagttgtggaatattttaaatagagtgtagttgtggggaagggtggggttaggaggtaggtgttgggggtggtttttttgttttgttttttgtagttttgtggttttgattatttagtttggttttaggatggagttttggtttttagatatatggtattgggtgaggttgttttttagtatttgttttaggaagttagagtagttgttagaagagagaggagttgtgtttgtatttgttgttttttaggtttgggatagttgttgggattgagggtttgtataatggtgagtttgtttggaggggtgtgttgtggttagatagttatgttttgtgtggtgtggatagagggtatatttagttttggaggagtgtatttagattttttgttttggggtttaaagtgtgggtagtttttaattagattttggattttagtagatagtttgggaggatgttatgtggtttattttgatatattgttttatttgtgattttatttttgagagttgtagggaggtgtttttttagttggattttattttttttttggggttttttgtgggtgttataagtgattttgttttttttagtttaaggggggtttttggggtatgggttgtaattgataggttagagtagtttatggttagggttgagttttttttttgttttttttgaatattgggtttaggaaggggttaaagtggagatgttttgattaaagttgagggaggtatggagtttttttgattttgtttttttattttattgttgttattgggtgtattttgtggagttttaggatttttaaagaatttagagtggagatttttggttttatttagtgtaggtgagggggaaagtgatttgtttatagttatatggttattattagtatatttgggttaagtttgattttattttatggtttttgtttgaaatttggaattggaaatggttttggaaattattgattttatttgttgttttttaaaatggtttgtagaggttaagatatagatttttgtaatgttttgtttatttgtgtgtggggaaatggtagaggagtattggttttgtttttatattgtttgggttgttgtttttgttttgtttagtggtttttttttttggtttgtttttttattgtggaagtgggtataattttttttgtgtagtgtggttagagtggatagtgatgatttgtgaagtagggtggagtgtttgggggatttgtgttaaataagtatataaataaaagttaatataatttttatttaattagtaagtaggttttgtttgaagtttttgggtagtattttatgttatttttaggttttaggttggtggtgttgttttgtgttttttttatttgtaagttggtgtttagaagttttgttttgtgttttggtttttattttttttgtgatttttttttttttttattttaaaaagtaatgtatgatggggtgtggtggtgggtatttgtagttttagttgtttgggaggttgaggtaggagaattatttgaatttaggaggtggaggttgtagtgagttgagattgtgttagtgtagtttagtttgggtaatagaataagatttttatttgggaaaaaaaaaaaaaagtgatgtttagttatttttagatagaaaatgaagattatatgaaatttggaaagaagttttttttttttattttttaatttttttttaaggggtggttatgttgatagttgggtgtggtatttttttgaattttatttttgtagagttatttagggtttgtgtaaaaaaagttaatgtgtaaatatagattttttaagaatataaaggaaattagatttttgttattagtttttattttttttatttaataatattgttgttatttgtagatgtagtatgtttttttttttttttttttttttttttttttgatagagtgtggtttaggttggagtgtagtggtgtgattttagtttattgtggtttattgtaatttttattttttgttttttgtttttaagtgatttttttgttttagttttttaagtagttgaaattataggtgtttgttattatatttggttaatttttgtatttttagtagagatggggttttattatgttggttaggttgtttttgaatttttgattttgagatttgtttattttggttttttaaagtagtatgttttttttaatggttgtgttattagttgttttatggttttgttaggtttgtttagttttttattgtgattgagaggttgtaatagatgtttttgtatttgtatatgtgtatatatgattgaaggatgagtttttagtgaatttttgtgttaaggatgtgtgtatttaagttttgatttgttgggtatagtggtttatatttgtaattttagtattttgggaggttaaggtgggttgattatttgaggttaggagtttaagattagtttggttaatatggtgaaattttatttttattaaaaatataaaaattagttgggtatggtggtttgtgtttgtagttttagttatttaggaggttaaggtaggagatttgtttgaatttagtaggtagaggttgtagtgagttaagattgtgttattgtattttagtttgggtgatagagtgagattttttattaaaaaaaaaaaaaaaaaaaaaaaattgatttttgtttttgaattggtttttaaagtggttattagaattttttaggatttttttttttgttgatttgtttagttgtttgttgggttttgtgtagtgatggtttagtagggaggttttatgttttttatttttggttgagggttaaatgttttttaattggtgttttattttgtgtattttggttaagtgagagggattatttttttgtatgttataggttagggttttgtgttttttttttatttggaaggtgtattttttttttgttgaaattttttaaaaagagttttttgtaagttaggtgtgatggttaatatttataattttagtattttgggaggttgaagtgggtggattgtttgagtttaggagtttgagattagtttaggtaatatggtaaaattgtatttttgtaaaaattagttgggtgaggtggtgtgtttgtagttttggttatttgggaggttgatgtgggaggattatttgagtttgggagtttgaggttgttgtgagttgtggttatattattgtattttagtttgggtgatagagtgagattttgtttaaaaaaaaaaaagagttatttgtatatttttattatagtaggtatgagtattttgtttttagttgtttatttttgattttgtttttgggatgtttttttatatagaatattttaattttgatattgttaagtttttgtttttttttttagtttttggaatttatattttgtttagaggttttttgtgttttgaaattataggaaagaattttatttatgtttttttttagtatttttgtggttttatttttatatgttgaaattatgaatttattggaatgtattttggttttagtagtgaggtaggggtagatggtattgtttggatatatagtagtgagtttggtttggagtgggtggggtgtgtgtgtgtgtgtgtgtgtgtgtgtgtgtgtgtgttatttttattagttttggtgtttgtattgtgttggtttagtaaaaataatttggatgtattttttttattttttgttttttggaatattttaagtagtaatataataatttttttgttaaaattttttaagaatttatttgtgaaattatttgagtttgatatttttgggggagtttagtattttaaaaatttaaattttttttatgggtttgtgagtttgggagtttttttttttttttaaaatttattattattttttttttagaaaagtgttttttagtttatttaaaatttgttagtttattttgagggggttgttttagtttgtttagtgaggatagtgtgtagtgtggtgattgatatgattgattagtagagtatgattgattagttggtgtgtaaatatgattgattgtggttagtgttttgggatgttttatgttgaggtatatgtgtgtagtgtagggtgatgtgtattttgagaggggatgaagttataggatttttgtatttttaggagagagtttttttttttaaggttgtagttttgagtaggtagtgatgggattgggtttagggggttgagtggttttagtaggttaagggttttaggaattatgagaagtttggagttgtttagagagtagtttttaaaattagtttggattgtagtttttagaaagatatgtgattgatattatgaattaggatatatttatatatggggtgggggtggggatgggatgtattaatgaaattaaatttttgtgatggaatttttatttttattatgtgtgtgttatatttagtatttttttttttttttttttttttttttttttttttttttttttttgtttgtttgttttggagagagggaaggtttttttttatttttttttaaatagttttattgagatttaagtaagttattatataatttattaatttatttatttatttatttttttgagatggagttttatttttgttgtttaggttggagtgtagtggtgttattttggttgattgtaatttttgttttttgggtttaattaatttttttgttttagttttttgagtagttgagattatagatatgtattattatgtttggttaattttgtatttttagtagagatggggtttttttatgttgaggttggttttgaatttttgattttaggtgatttatttgttttagttttttaaagtgttgggattataggtatgagttattgtgtggtttaatttatttatttaaagtgtataattttatggtttttagtttatttagagagtagtgtaattattgttattataattaattttagaaaattgaaaatttgagaaatttagaaaattttttttttaagaagaaattttgtagtttttagttattaattttgttttttttttttatattttttttttatttgtgtggattttttttttttttttttttttttttgagatagggttttattttgttatttaggttggggtgtaatggtttaatttttgtttattgtaatttttattttttaggtttaagttatttttttattatggttttttgagtagttgagattataggtttgtgttattatgtttggttaatttttgtattttttgtagagatggggttttattatgttgtttaggttggttttgaatttttgggtttaaatgatttttttgttttggttttttaaagttttggaattataggtgtgagttattgtgtttggttgattttagatattttttgtatagagaattgtatgtttggtttttgtgtttggtttttttatttggtgttatgtttttaaggtttatttatattgtggtaggtgttagtgtgtttttgagtaatattttattatggtatggattattttattgtggatagatatgttgtttttattagttgagggatattgggttgttgttattgttggtgagtgtattttttttaaattaaaaaaaaaatgttggttattatttattagattgtttttttggtttatagggtgggataagttggtttgggtgagggttaggaggtggttaggtggaggtggttggagtggttttgggttgtttttgggtgtagtaggtagaggtgtaatggtagagtttgagtaggttttttgggtggatttttatgttggtaatgtttgtttatttaagaagttttggttaggtgtggtgttttatatttgtaattttagtattttgggaagttgaggtaggtagattatttgaggttaggagtttgagattagtttggttaatatggtaaaattttgtttttattaaaaatataaaaattagttgggtgtggtggtgtgtatttgtagttttagttatttggtaggttgaggtaggagaatttgtttgattttaggaggtagagtttgaatttaggaggtggaggttgtagtgagttaaaattgtgttattgtattttagtttgggtgatagagtgagattatgttttaaaaaaaaaaaaaaaaagaaaaaaaaagaaatttttagtgttgttttgtgtttggtattgaagttgagggaaggtagtattagtatgagtttttagtttattgggtttttgtttggagttgatgtgtgattaaggtatatgagggaagtatggtgaggtggatggtgtggaggtataaggagtaaaataaggtagatgtagtggtttagtggtttttggtggttgtgaggagtgtgggtaggatagttttaggagggtatttggagagtagggttggttggggtaaggtgtgttaggtatttgttaggagtaaaatgtaaggggatattaaagagtttaggaattaatatagatagtatttaatgtagtattttttaatattgaaatgatgtatagtaatttttatgatgaataaatgttggaattttaaattaagataggtttagttttgtatgtgtatagttttgttagagtttgtttagtgtggaatttgatttgtttaaaatgttgttttaaaatattgtttgatttttggattttttggtattgttttaatttttgtatttggatgaaggttttattttaattttagttggagagggttaagggttggtgaatttggttttggatttgtagagtttgtggtatttgagaggtggggttaggaataggaaggagttggtgagaatggtatttggtatgggatggggttagattagagtagtattgtggttttttttaatttgtggttttgttgttggatgtttggtgttggtgttgagtttttggttttttgaatggagtgtgatgaataatggggttggggagtttttgggtttttttttgaagtagtagtgaagttagggatatgttggtagtaggtagggagagggatgtttggtttgtgtttggagttagttgttttatggaggagttgggtgaggatgtggtgggaggaagatttttttagttttgtattttttgaagtataattgagtgtttgtgtggtttgggggttattttggtttgaggatagttttgttttgtttagttaggttttgaagagttattgggatatggatagtagttttgttgggtggtaggttgtttatttttgtttatttaatgttggaattggatgtagagtatttggatggttagttttagagtgtttttgatatttttagttattttattttttagattaggataagatgtgggattttaattttgagttttttatgggttttattttatgtgtttttataagttattgggtttattttttggttttagggttgtttggttatttggtattttggtttttttatttgtataatgaaaataatagttttagtttttttgaggagttataagatgttttttgtgtgaaaaattgggatttggtattagattatttggatttgaattttggttttattttttttaatttgtggttttgggttaatttggtttttttgtttttagtttttttatttatagagttattttattgagttgttgggaggatgaatataaggaagtgtatttatgtgtttagagtattgtgattttatttattattattaaatgaggtatataataagtgtttaatagatgtttagtgttattttatggattttgtgtgttttgtgtgtttttagtagttaagttttggaggtggggaagttgttgatgagttgtatgaggtaattagaaagaggaggttataggtgtaagggtttgggtgatatttgtggatagagagaggttgatggattttggtagaggggaagggggtttttgtatatagaaaatgttttttgtatttaagatttttgtgattttggaatagaggtagtagaggtttgtaaattttaaattataaatttagaaagtatagaatatttgtagagaggattagaaatattatatattttagtgtgtatagaattttttatatagttaaataaaagtatgtttttaattgaagttgttggagagtttttgaggattttatattagataagggttggtaagtggaagtttaatatgtaggagttattttttttgtttataaatgtttgttgttttttttgtttatatttgtatttatgtgagggtatttataggtttattgtttagttttatgttttgtttgttattaaaaaattttttaagaattttttagttgtaaatttttttattggagggggggttttaggaatttagttttgtttggggttggggtattttagtatttgttgtataggtgttggttattaaaggttatgtgttgtatttgtgggtttttggggtttggtggtatttgggtatatagtttagtggtggttttttatttgttagatattgggagtggggggttttttatttttgttttttggtggtggggggagtgttttgagttgttatatattagaatttattgatttatatgttgtggtattttatagttttttgatagttttttagtttgagagattattaaattgagtttttggagagggtggttgttgaggtttggatataggtgtggataggatagttttgttttattttggagttttgttttggtttagttttttgtgggtttgaagtttaggttgggttagtttttgttttttagatggttggaaaggtagtttagttttatggtttttttgttaggttttgagagttgtttggtttttagttttgtttttttttttttttaagatggagttttattttgttgtttaggttggagtgtagtggtgttattttggtttattgtaatttttattttttgggtttaagtaatttttttgttttagttttttgagtagttgggattataggtgtgtgttattatggtaggttagtttttgtatttttagtagggattggtttttattatgttggttaggttggttttgaatttttgattttaagtgatttgtttattttggttttttaaagtgttgggattataggtgtgagttgttatgtttagtttttagttttgttttgatttttttttaaggttgtgaggatgtttatgtttttttttttttttatggtttattgatgtttttagatgttttgtaaagttattttttttttgggagttttttagttggtgatgggggattttttggggattattgtttaggtagttatgtaggtttgtgggttgtgtttttaggttggattgagatttggtgtatggggtgtttttggtttgagttgaggtttttggaagttatagttaggaggtagtaagggatggttgttatgtttttttttttttgttttttagggtttttgtgggatagatttttttgtttgagttttttggttgtttatattttggttttttaaagtttagtttgaagttttaggtattttataatttgttttttttagtagtttgttttgttttttttttgttgatgtttttgaaatttttttgtttttttttattttttggttagagagagattggagattttgtgggaatttttgaggggagggagaaggttgttgtttgaatggaggtggtttttttttttgtttttttttaggtgggttatatttgtaggtttagttttttgttgtggtagtgtttggggtgttggttgttttttgggtatgagttgggagttgagggaggtgtttttaggattggagtggtaatttagttggaggaggagtaataggtttgtggttagtagtagttgttgtagggattttggtgttgtatttgtgttttagttgattttttttgtttttttagggtgggttggggatggtggtttgttgtttagtttaggaagaagaggggttgtaattagtagtagttattttaggggattttagtgttgtatttgtgatttagttgattttttttttttttttagggttggttgggaatggtggtttgttgtttagtttaggaggaagaggggttgtggtttttattttagaggttttttttttggttttttttttggtgttggtttaattgtaggtttgttttaggttgtgttggtatttgttgattgatgtttagtggatgttgataggagagggttgggatggggaagtagtaagttttggttattgtgggtttgggttatagatggttgaggtattttttggttatttttaggaagtaaggttttatgtagtttttgatttatttattgtttgtgtgtattttaggaggttgtattttttaaggtttttattaggtaattttattgggttgggtgttgttgtaaaattatttattgggtgtggtggttttttggtggggggtatggttggggaggatgtggtggaggagaagttagttttgtggttggggggagggtggattatttgttttttgtttgttttttgaattggagtttatggttttttttttaggtgtttgggttatggaagaggttatagttttgttttatttttgtggtagtttaggggagttttggttagttttgtgttttttgggagggtgatagtttggttaggttgtagggtaggattggaatgtagatttttgtttggttatgttgttgtttggttgttttgtttggggattttttgtttaggaagagagaagtgggttggatagtttggtttagtgattggaagtttagttttttatgtttagtttagtaggaagtttgtttttttggaatatttgtgtgtttttgtatgtgtttttttggttggtggttttgtgaggtttttattgggttgtgttatgttttttggttattttggttttggtgtttggtttttgtgaaatagagatatttgggtagttttttatttgtgtttgtaagtttgtgtggttttagtgatggttgattttgttttatttagaggatttgggaatttttagtttaattgtttagaggagttttttttagtggggagagtttgagttgtttttttggtggatagttttttagattttaggtggatttttttgttggttgttttttttgttgtttttgtttttttgttttttatttgttttttatttttttttttgtagtagttagttggtatggggatttttttttttttttgggattgtgaatgagatgatttttttggtttttttgggtttagatttttttggtaatagttagtgaaatttttgttttaggtgggaggagaaggtttagtatgtggttataataatggttttaattatattatttttaaatgttggtttttatttattttttgttttgtttaatagttatttttattattttattttttagattaggaaattaaggtgtagagagttttagttatttgtttgaggtttttatagttaagtgtttggatttgaattttggagtagtttggttgttgagttgttttggagatggggtattgtgtagtggttggggtaggggtggagttttgttgttgttgatttttgggttatttggagtgataatatagtttagtgtttgggtttttgtttgagattttggttggatgttaggagtttgagattttttagtttttttttgtgtaaggtgttatggggtgaaatgaaagaaaattttagttagaaggtgtttttttttttttttagttttttagttgttttggattttgaaataagatattgtttgtttgtggggtgagtaggaatagattggaattgtatttttttttttttagttatagttgttaggagtttatttttttttgttttttttttttgttgtttttttttataagattgggttggatgttgttgggaaagttaataggaagttttttggttgtggtggaggtgggggtttgtgtttttttggggattgagatgagggttttaggttggttttggtaagagtagggaggtttatgtttttgtttgttggttttgttttttgttttgggagaaggtatttatatgttttagaatgtattttttgtgtgtatagggatggtttttgggttatttatttgaggtttattgatttttttttttggaattggagtggtttttttatggtggattgggttgagttttttgttttggttgatgtttttttttaggtatttttttttattgtgttagggtgtaggttgttagtggatgggtttttatttttggggattggtagttgttatgtttattttatagttgagatattttggttgaaggttttgttaagttttatggagtgtagggattttttttgagatggtttttttttgttgtttaggttggagtttaatggtttaatgttttgtttattgtgattttgattttttaggtttagtagtttttttattttagtttattaagtagttgggattataggtgtgtgttattatgtttggttaattttttaattttaatttttttttgtagaaatggagttttattatattttttaggttgaattttaatttttgggtttaaatgatttttttgttttggtttgttaaagtgttgggattttaggtatgagttattgtgtttagttggggtttttttttaattttttttggttttttttaggtgtaggatttgggttttagttttatgtgtttttgaatagttttgggttttgttttgtattttttgggtgtgtggttaggttttttgtgatattagtaggagatttaggtgaagaagtaggtagaatggaatgtttgtttatttagttttggggttaggtggggtggttaggatagtagtagtggttggtgtggttttttgggaggttagtttattggtgtggttagtgaatggggaggggagtttttttttttgtttttttttatttttggtttttgggtttttagggttaggtttttagagttttaggtggaggatggaggttagggaagttggggtaagagtgggttgggggtgggtggttaggtggattttggaaaattattttttgtaggttttgttttttttagggagtatttagggttggttttggggagttgggttaatggttattttggatggtgtaggggtttatttttatgaaattgggtttatttttatgaaattgggtttatagaagtttttggttttggttttgttttgttttttggtttttgtttttaaagtaggatttaggatagttttgaattttttgttgaaatgtagttttttgggttttaatttagttttttagaattagagtttttggggtgggttttttgtttgtttagtagtttttaggggatatttgtgtttgttagagtaagtttaataagtattgttgtaaattttttgtttttatagttttttggtttgtttttttttttttgttgggatttgtattaggattaaatgttaatattagggattaggttatatttgtgaattttgagataatatttgtattttttttttttttgaggttgttttgtttgttttgttatttaggttgaagtataatggtgtgatatttatttatggtaatttttatttttagggtttaagtaatttttttgttttagttttttgagtagttgggattataggtttatattattatatttggttaatttttgtatttttagtagagatggagttttattatgttggttaggttggttttgaatttttggttttaagtgatttgtttgttttagttttttaaagtgttgggattataggtgtgagttattgtgtttggtttgatatttatattttgattaagttgttgtggaaatattgagttttttttgatagttttgtttatagagtgaatgtttaggaattggtgaggtattttttatttttatttagatggtggtttggaggtagtgtttttgattttgtgatgggatttgttttttttgtttaagagattttagagatgtggtttttgaatgtgggggtttttgttggggtgggaatgggagttggttttggttattgtttagtgattttattttagtgttttgattttagtatttttgattttagtgtttttttttttttggttttgtgtggagattatgtggtttgtgttgagtaattttttattgtttttgttgtgtttttgttgtagggaagtttttttagggagttagttgatatatttggtttttattatttgtttttgaataggaatgaaaggagagagtgagtaagaaagtggtaggaggtgggggttgtagagtaggggaaggttagagagaggggaggaaagatttggaaagtttaggtatgtgttttggaagtaggtgttagtgatgagtttatttggagggtggttgtttgttttgagttttgtttggggttagtagggaatattttgttagggtatgttgttgggagtttgtttttggtttattttttgttgttttgagtgttgagtagatttgtttttattttagggataatgtaaggaggttgttattttattttttattttattaatattttatgaattataagtgattatttattgtgttttgatgtattttaggtgttgggtttgaagttttatgtgttttatgggatgtatttgtattattgttgtagaaaatggtttttgttattattgtagagaaggtattgaggtatagagaggttgaggaattggttttaggttatatagttagaagtggttgattttggttgtgaatatagggttgtttgattttaaagtttgagttggtttgtagtgaggtttatggtttttgtgttattgtttgagtttttggttgagttttttggtttagtggggggtttagtgatttattagttgttttattatatgttgtggatatttttatggtttatttgggtgggagggaaggggttttaggaggtgggaggggtatagggaatatagtttagtttgtttgggtttaatattttgatttttaaggtattttttgagggtagtatgaggttaagtttttgtttttttttaggattttgtttttgtgagggttttggggttttttgtttttttttgggggttttgttggttaggattatagagaagttttttgttgttgatttttttgtttttgtattttttggtaagttattttatgatttagttgttttgtttgtaaaatgggttgaataatattgttttgttttggagggtttttgggaggattaaatgagatttgttgtatagaagttttttgtaagttatgttgattggtggttgttgggtttttaagtgaatgggtatttgggtattgagtgtgtggatttagtatttggaaggaggggttggggggtatttagaatttttgggaggtttggatttttgttttgtttagattttgagtttttttttggttagtttaatttttattagtagggtgagggtaattaggatttatgtatagttgggtgaagttgagtgattatatgtggaagtttagtgttttttatgtaaagtgggtaggtggttaaagtgagttttgttttagtttttttatttttggggttgtttttggtgttttgtttttttttagagttttattgatttgtattatgtgatttgggtttgggaagatgggtttagttgtgggaggttgtgtgggttggggattgagagtgttggaggagggttttttaggaaaatttagttgtataggaagttgggttagtggtttttggaagtttttgggttttgtaagttggattttttagatttgtggttgtggggtttttttttgtttgtagttgagagtttttgatttgtatttgagggttttagaggtttgggagggggatgtgattgtgtttttagggtgaagtttatttgagtgttattttggatatagtttttatttttttttggttttttttttggttatggggatgttgtttggggggggtttttttatatggaaggagttgtagttgagttggtgggttttgtatatttttaaggttgtttgatttttagtttttaagtggggttgtatttattatttaggatttggagttttagttagagagggattttttattgtttttttttttgttttttgggaaaggtagggtttttgtgtttttttttatttagggatttggtatgttgggaggttaagaggaagttgttttttgtttatttattttttaatttttttagttagtagagttttatttgtgtgtttagaatttgtgtgtggagttagaagttataaggttggtttagttgtgtttgattttggttgtgtggttttggatagttttagtttttttggagttgagtattttgatttgtagaggagaggttgttgtgttggttttgtagggttttgtgtagaggggagtgtgtgtggttgtgagtttaggttatgtttttagattggaggataggattggaatagtgggttaggatggttagagggttttagttttaggaggaggtttttatattttttagtatttttatattaggaaatgtagttaggtttttaggttttttatgttaggaagtagtattttgttttttatttttggttgtttgggtttgagaagttgagtattttttttgaatttgagtgttttttgatttttgtttgggtagttgttttttttgaattgattgtttgttttatatagttttttgtggtttgtttgatagggtggttagtgagttttttgtatagtatattttttttaggagtgttgtttgtgatgatggtgtaaagggtgtttttttgagtttttggaggtatgtagtggtgtaatagtgtgagtttaggagttttggtgagtttttggatggagaatttgtttagattattttttagtttaaattttttttgggtgtttgttgtgtttggggtgttgatttattgtggggtggtttgtgagattttatgttatttggttattttttttagtttttgtttattgtattggttttttggtttggttgtttttggaatatgagggtttatttttatggaagaatatttatttgtttttttttggaaagtttttttttagattttttggttgttttatttaggttttgttgaagtgttgttattttggagaggtttttttgttatttgtagttaaaatagtttttttatgtttgtgggtggttttttatggggtatggatgagtattggagagttttgttgtttatttgtttatatgttttttgggagggtaggggatattgatttgtgttgtgggtgttttgtatgttatgggtgtttagtgaatgtttgttaagtattaggggagtataaaggagggaagtttttgtttaattggagtagttagggaagattttttggaggaagtggtatttggtttgtttagaatgtggtgatttgtttgtatgtagatattagattagagggtaaaggttattattataatttagtagatagttataagtagttaaggaattgttatgatatggattgtttgtgattggagttaagaaggagttagagatagaggtttttgtgttttggtgtgagtttttgggggaggttgagtttttagaatgtggggttgtttgtgtagaggttggaggtgggagatatatttgtgagtgttggtgagtgtggggtgagttattggggttggattagaagatgggaatttttaaatttattaattagttttggtgttttgggagtgataggagatggggtttttgggggattaatttagtataagtggatgagatgggatgtaggggaaaggataaagttttttgaggttttgggaagttgagttagggtagagttatgatagggtgagttttagaagtaatataagaaaaaatagttagattgggttttttttttattgtgggagatgttttattttattttttttgttttttgggttttggtaatgggttgggtatagtgaatgggttttatttgtaggagtggttatattttttgggtatagttgttttatatattgtattgagatgggatttgaggttgggaagaatagttttttttgtaggttgatattgttagtttttggggagggaaggatggtagggggtttggagtatttttttttgttatttatattttgtgtttgtttgtagggttttgagttttgtttgttttgttttagttttggttaggaatttgttggagtttataggggtagttaggttggaataggaggagattaggttggtaggggagttgagagggggttttggatagtatttagggttgagttattttgggtttgtttgatttgttatttggagttgtttttgtttgtttattatgtgtaaggttttgatttatttgggtttgtttaattagtgtttttttttaggtttagttagtttggtttttgtttgatttatttattgttattagtgttatttttgtattatgtaattagtttttgtagtatgttagttattaagtttagggttttttgtgtattttttgtaatttttatagtaatttgggaggtatagagaggttgagttgttggtttatagttatatagtaggtatggggtattgttaggatttagttggatttttgattttagggtttttttagggttttgggtgggatattggtaaggaagtaaggtatgaatattggttttgttttggatagagtttggggatggtggtttggtaggtttagttgatatagtgattttggtgtaggtttaattattggtaaagtgtttaagtatatatagaattttaattggggagataggtgaagtggttaagggagggttgtgagtgataggtggatattgtatttattggtagattagttgattttggtgttttttggagttttttaatttttttatttagaaaaagaggaattaatagttttatttttaaattgggtgggagtattatatttgaaattgaagtaaagttggttgtgttataggtttggtagatgttagttgtgtaggtaatttagtgattatttgaagtaggttgtgtggtggtatttttattttgtagatgtagtttagagaggttagggtattaattttgggttatatagtgatagtttaggttatagagagtagtgttggatgggagggtgttggtagttttaggtataggttgggagggttgtggggttagtagagggagggtatattttttagttggtggggtttttttgtgttttagtatttatgtgggtttaaaggagttggaaggagggaggttagagttatttatgggtttagaagttgataagtaggttattgattttgaatttgttttattgtatgtaaattggggataaatttggggatttaatgatataatgtaagaagtagatatgttatagttttggttatatagttagtgtataataagtggtaagttgttagaggaggtagttggtgagaatgggagtattttagtagttttttgttttttgtttttggttgtagatgtatttgtttttggttatttgtgttttagttttgtgttttttggtgtgtgtgaggttaagtttttggggtggggatttgggggtgtgtttgtagtttttgaggttaagattaaggttgaggttgaggttgaggttgaggttattttggtgaggaggaaattgtaggtggagaagtttgttgattgtgattttgatttgattgtaattttgatggtgttgatgttgttagtatgtaggttttttgtttttgttatgattggtttttgtagtttatttggttgagaggtgtgttggtttttgtaggttgtaaaatggggatattattgtttgtttgggttatagtgtgtttgttgattgtatttggggagggattgagggttgattgtgttgtggggatgttggtagagaattagagagggtatttaaaaaggttaatagtttggtggggagaggaggtgtaaggttggtttttgttttttgggttttgattgaaagggaataggggatatatttggggatagttttttttttggaggaagaagggtttagggtgttggtgtggagtttgtatagatggggataatgagttggagggtgttgggtaggagttggttagtaataggttgatgagggaggttttgttggttgggtttggtttttaagtgagtattttgagttgtggggatttagggggttttagagattttagagttgagatttgggattatagaggggtgggttgtgtttagggtaatatagtggatggggtagatgttgtgaaatttgtttttttgttttttttttttttgttatagaattggatttttttagtttatggttgttaaattttttagatgtttttgggttttatgggtgttttatattggtttttttgtaggatagtagattttgggggttggttttgatggtatttattatggggtattttatgtaagtatagtgtttttatgtttagttttttagtttgtggagtaggtttgtgtttggttagttttattttgtggttagaggagggagatagtggttttggagataggagttggtttggggttgtttttttagtttttgtttttttagtttatttttttgttttgtgggtgttggttattttttttttgttagttttatttttagttttttttgtttgagttgtgatttgttagtagggggtagtggaggttttgaaagtttttggagaggattttgaagtagtttttataaatttgtttttggaaagttttttttgttatatttttagtggtttttttttttttaatattttttttggggttgttatgtagtggggggtggaggaatttattaggttgtggatagagtagagttatgttgatataaattttggttgaatttatatgttttttatagttagtggttgattattggaattagggaagtgattttatagtaagggtttgtagagtagttattatgtatttttgattttggtttttggatttagttttggaaaagaagttagattttagttatttggagttgtttagggaagattttagtttggtgttggttgatagtttattggaattttttatttgtttggttaggtgatgttaaggggtagaggttagaagtgttaagaagtaggttgagggtggtggtttatgtatgtaattttaatattttgggaggttaaggtgggtgaattttttaaggttaggagtttaagattaggttggttaatatggtgaaattttatttttattgaaaatataaaaattagttaggtatggtggtgtatgtttgtaattttagttattttggaggttgaggtaggagaattttttgaatttgggaggtagaggttgtagtgagttgagattgtgttattgtattttagtttgggtaatagagtaatattttgtattaaaaaaaaaaaaaagaagaagaataagaagtgttaagaagtatttgtttttttgattgaaaagtaatttttgttgggtgtggtggtttatgtttgtaattttagttttgggaggttgtggtgggagagttgtttgaggttaggtgtttgagattagtttgggtaatagaggtgttaggggtagtggtgtttgtttgtagttttagttttttaggaggtttaggtaggaggattgtttgagttaggagtttgaggttgtagtgagttatgattatattattgtattttagtttttgggtgataggatgagattttgttttaaaaaataaaatataaataaaaaattaatgtttattttttgtgattttaaaaattatatttatttgtgataaaataattaaattagaaaatgtaaaggaaatgattaataataattgtgttttttagataaatattgttaatatgtttatgtttttttttagtttttttttatatagatatttaatatttattaatttgttttgaattaaagatggttttttttgttttgtatgagaattattttagttaggtatggtggtttatgtttataattttagaaagttgaggtaggtagattgtttgagtttatgagtttgagattagtttgggtaatatggtgaaattttatttttataaaaaaatataaaaattagtttggtgtggtggtatatgtttgtgtttttagttttttaggaggttgaggtaggagaatagtttgagtttgggaggtagaggttgtagtgagttaagattgtgttattgtattttagtttaggtaatgggagtgaaatgttgttttaaaaaaaaaaaaaaaaaaaaaaaagttgttatgttgttattttttttagggatttttattttttttattttttgtttaagatttgttttgtaaaaggatgaggttaaatagttatgggagggtggtattggatgtttaaaaaaatgttttgtggttggtgggatttagaaataggttggggaggttttagtagagggtggattttagttgggggtggggggtagtaggggggttttttatatgttttttttgtgtgttttatggggttgtttgtgaggttgtgtgaattagagtttggttgggaagttatatgttatttggattttgattttttttggtagtatgattttagttaatatgtttaattatgtttttttttgtaaaatgggttaatagaaatgtttatttgagatatgatgagaaataaaggtgtttatagagtaaagtgtttagaatggttttggtatgataggagtttatatgttagtgttgttgttggtattgttattattatggtggtattggttgttttgttttttttttgtttttgttattttttttttttagtaggtttttatttatttgtttatttatttatggttgaggttttgtttgtgttaggtttggtgttgagaatgggggtagagagatgggggttgtgttttgttttttgatttaagggttttttttgtaatgtgaagtttttggagattggatttttaggttgttttattagtttttttttaggttagtttaatttttttgtgtttgttttttgagttgttagaggaagagagtgggaggaaggatggagtggggtttttgtggggattgagtggggggtgtgtgaggttttggaaatggtgtttgtggtatttatgtagtattagtttttgttgtagttgttgtttggagaatatttttggattttaggatattgatgatagaaggtggaatgttttttttggaagttattaagaggggattattgtggtggttgagtagagttgttgatttgtgagttgtggtttgattatagttattgtttttatgagtgaggttttttgtggttttttttttaggaatttttggttttttggtaggggatagtttagggttgggggtgggtagtggtgtttgtaggtttttttggagttagagaattttttgttgttgtggtggggttgtttttttttgtttttttttttttgttgtgtttttagttgttttgataggatgtttttggtttgagagatagaaattttaattttgaatggttttagtttttaagagaatttggagtttttttgtgtaaaatgagatgttttgagtattgaggatgttgtgggggattttttattttattatttttagttgtggtgttttttttggttataggatgttgtagttatgttgtagggaaggagagtttttttttttgtgagtttagggagtttttttatgtagtttttttattggttattgtttgagatttgatttggtggtttttgttttaaggagtagaaagggggtttgttaggttagggtggggttgggtgtgaggattttttttggttaatagggtttgtttaggtgtttgttttgttggggtagtagggaagggatttatatgtggtattgggatatggagaggtttttgtgtttgtgatggttaaaagggatggtgttttagttatgtttttatttattttgaggtttagtatggttatgttggaaatagtagtattgttttttttattgttttggtttgtttttaataggttagaggggtggggttggagtgggtgtttgatttgtggttggatttagttgtttgtggataggttgtgagtgaatttgtagaggaagggagatgggaatgttgggatttttttttgtattttttgaatttttgttttttgtgagttagatggggagtgtatttttgttttttttttttgggtattttttgtgttttttgttttaggtatttgatgttgtttgtttattttttttttttgttttttttgttggttttttttatatggttttaattaggattttttgtttgttggtggatgggtagagaggggagtttgttgtggggttttttttgattgggggattttttagtatagagttttttggtttttgtagggatgttgtgtgtgtttgtgtgagtttggtgtgttagaagtgttaagttgtagttgttttgtgtgttttttatattttttattttttaaaggttttgggtttggtgtttgtgggttggggatttgtgttggggtttttaggaggtttttggtgggagaggtagggtttttttttttttaatttgggtaattttgttttggtttgttgtttgtggaaagtgttttaggatatggtggtaggattggttggggttttggttttaggtttagttttagtttttgttagatttattttttttgtgtttttgtttattttgtttatttgtagggtttgtaggagtattttgagagttggtagggtggtttgtttggtgtttgtatagggtttgttggtgggtggttgaggttgtggtgaggtttttatggtttttttgttttgtatattttttttttgttgtgttgttttgttagtatatgagtttgtattgtttttgagtttgtagtttgttttttttattaggtggttaagtagggtggtagttagggtggtagagttttattggtttgtaggggattttttgtgggttgtaggtagttttttgtggttgaaggtgttttggtaggatttgtattatgatttttgttaaagtttatgtttaaggtatttgtgggtatttttgttttagatgtgagggttggtatttttttttgtatgtgaagtaaaggtttgtttgaaggagtgtgtggaagtttgggtgtgatgaaggtaaggattggtggtttattttttttgtatttggattttgggtggtaggtttggggtttttagtttttaatttaggagggtagttagttgttggaattaagagtgaattttagttgttgttgttatagttggagggaagaggggaaaggaggtgttgtaggggagtagagattttattttttttttgttgatattaggttgttggtgttggatggggttttggtaattgtggtaggagtggtgatgtttgatgatggtaataagggttttttgaggattttgagttgttttaagggttttttatttggagtaagtattttttttaatttttttaataatattgtgaaattgattttgttgttatttttattttattgatgaggaatttatagtttagagatgttaagtaatttgtttaagtttttttttgagtatggtagagggagggtttgaatgtggaaagtttggttttagtgtttttatttttaattattgttatttatttttttggttagttttttgattgtaaaatttgaggtttagaggagtgtagtgatttggttagttttgtatggtaggttagtggtagagttgagtagtgttttttatgttttgattttgtggttttttgaggtggtttatttttaaatatgttttttatggtggttttgttttttttttttttttgaatttgttagtttgtgtttaggtagggggagaagtagagtaattatgttgggtgggttgttgtgttttagtgttgtttgttttatatttgattggtagtagagtggtttttttttggtgtggtttggaggtgttagtggttatttattagtatagtttagttttatatatgttatttttaaaggatgttgatatagaatgaagtagttaggggaggtggatgttttggtatgagggtggtgtttttggtaatttgtagtgttgttgtttgtggttgtttttggttggtattttatttttttttggttgttttgtagttatttgagggaggttagtatgttgtttttattttaggatagtgtgaatgtagtagtgtaagtttgttagtgttgtattgtgggatttggaggtttttgtttttgagttttgtttttgtgtaatttttaaagtatggattttttaggggtttttatttttttatttggaaaaattttatattgtttagggtttgaggtagggttagagtatggagatgttgttggaggattaagggagaattgagtgtgtgtttttttggttttagttttgtgtgtgtgtttatgtatgggtattttgttatttatattggtttttatggttgggtgggagttgagttgagtttggtggttgtttttttattttgtgggtttggttggggagtgtgaggatgtttgttggaagttaatgtgtatgaaagagttaatggtggattttatttttttagttttttttttagtttttttagggaaagggtaggaatagagaggttttatttttagaggaaggggtgggtggggatatagtgttgtttggtatagttttttttgagttattttgtatgttttattttattgatttttgtagtttagttgtttagagtggatttagaaggtggagagagggtttttaataagtagaggatggagtgaatgtgagatttattattgggatttggtaaagtaaagagttttattttttttttgtagatgggatgggggtggggttggagttagtggggtgggggtatttagtaagagtttttttttatttttttattttttttgttatgggtttttttttttatgtagatttttagtttggaatgattagtgtttagttttttttgttttttttttgttttgttggagggagtgatttggtttttggttttggttatttatattttttgttttgttgtattagttttgtggtaggggttgtggtggaggtgggtaaaagttgtttttgggtagttagtttttattttgggagtgattgaaagtttttgggggtttttgtagggtgagttgtttattttggttttggtaaggatatttaggagagggttagggtgtttgtatttggggtatagtataaagaatagttgtaagtgttttttaggtaggagggtgttgaagtattgggaagttgggatttagaagtattgtttggggtggtgagtggaagatgtaggatatagatttatgtgattgtgtagattatttggttttatttttttggtttatagtggaggaaattagaggttgagagaggtgaagtgagttttttggggttatatagtttagttaggtttagggtgttgattttttgttttgtttttttgtgtttatttggttggtattagtatttttgttttgatatttttgtgtggtagttgttgtgattttgtgatttttttttattttattttagtggggttttgtgagggaaagaagaatgttttatgtagaagtggttggaaagtaagaagtttggagagaagtgaggtttttgtggtttggtttgagtttaggatttatggtttggtttttagggatggagtattgattttttttttttatatttttattttatgtttttaggagttttttatggggaagttggaatggatttgggtttagagattgtaaatttattttgttggatgtgtggttgtttttatgtaattaatttttttatggagaagttaggggatggtttttagtatttttgggggttttttagtgaggtgggaggattttgagaggttaggaggttgtttaagattttttgttttttagggattaggtgagggtttgttgattgttttgattttttgatgtttttggtggggagattttagaggggtttgttgttattattgttagtggttttggtttgtttagttatttttttggggtggttaaattttatgttgtaaaagtttaagtgaattttagtagtggtttgggagaattatttgttatgagttaaggatggagtttttggggaggattttttgttgttttttaattttttttgggtatatttttttgtagttttattttttgtaagaaagttaggtgttttttgaagtttttttttggttttaggttagaggtgatagtgggggttttttgtttgtgttggtgattgtggttggttgttggtgtttggttttgttttgtattgtgtatttattgaaggtggtattatttgggtttttttggtggttatgtatgggtgagtagtttatgatatatttgtttttagtattgtgtgggttggggtttttagaggggttgagggtttggatggttttgtaggggggtgtttttggttttgtgattgaaaggagttgaaggtttggagaagttgttgggttgaggttagtttttatagatttggtgaggagggaatagatgtttatggagttgttttaggtattgtatatattgttttattttgtgttgatagttaagaggttggttttttgttgatttttattttatagataatgtgtttttttagttttttagtggtggagttaggatttgaatttatgtaggtagttttttgggtttgtagttttattttttatttttttttaggatttatgttttggggttggtaggataatgatttttagagttgagtatattttaatttttagtatttgggattatgttaggtgatatggtagggttagttaaggttattaattagttggttttaaaatagggagatgattttggatgatttatatgggtttgttgttattataagagtttttaaaagtgtaatagattatttgaggggtgtagtgggagaggtttggaaggaggaaggaggttataagttaagaaatgtaggtgaatagaaaatgtaggaaaatgtagttttttttgtagttttgggagggtgtgtagttttgtggatattttttttgtagtttagtgaggtggagtgtgggattaatttgtgttgtttgatattataagtgtgtggttatttgttatagtagtgatgggaattgaatgttattaggtagtagtgtttttattttggaagaattaggataaatttttttgtggattttaagttttgggagattttgggtttttttggattgttttagttttgtaattataggaaaggttttttatgtttgtttgggagaagaaaattttgtagtaaatttatttttttttttgataaatgaaggtgagggtgtgggttggatatatgttttttttttgtggattttttttgttttaatatttagaattttgtagttgaaggagattttggggggttgtttgtttgatttgtaagtgaagaaatggaggtttagggaagttaagtgattggtttagggttatgtagagttatgttggaatattaagttagatagtttagtttttgttttaaagtgtttttttttttggttggggaggagggttggagggagtggattttgagtaatagtagtattggtaggggttggaagagtagttattgtatttaggtgttggagtttttggttattttttgtaggaattaggtgatttattatggtataggtttttttttgtttatttgtagttttgggggttttagggattagaggatattttggtttgagggttggggtttgagagaagagatggaagtatttttagtttggtttgtttttgtggtgttttgtaggtatatttggtagtttaggggttttagagaatttggttggtgggtgtttttattttgttgtagttgtattttgtggttagtagtttgtaggatttgggttgttgtttgtggttttgaaatagttattttttgagttgagtggggattaggtgagtagatttttatattttaattgttgtgatttttttgttttggaggttggtgggtagtttggttggtgttttatggtattttatgattggttttgttattaggtttgtgagttgtttttttttttttgggtattttgaatggtttttttgagagttttgttttgggtttttgtttttgtaggtttttgttgtttggggtgttttttttttttggaagttgggtttttttggggatttattaagaagggttttgttgagtgttgttaaattgttttatttggtttttatttgttttatttattattttattttaatttttatgttttttttttggttttaagatttgagtaggtagggtttgtgaggtattttaggttttttgatgttgttagtatttaggggattgttagtatatatgtagggagggaaggaatgaaggaagagatgatttggggagttttttagtttttatttgtaattggtatattgtgataaaatatttatggtattttattttttttatatattttttttttaaatttatttttatttgagatggagttttgttttgttatttaggttggagtgtagtagtataattttggtttattgtaatttttattttttgggtttaagtgagttttttgttttagttttttaagtagttgggattataggtgtttattattatgtttggtgaatttttgtatttttagtagagatggggttttattaagttggttaggttggttttgaatttttgattttaggtgatttgtttgtttttgttttttaaagtgttgggattataggtgtgagttattgtatttggtttttgtatatttataaaagagaatttgtttagaaaattttttagatgtatttttagggttttaaggtatagatatatgaagtttgttagtgagtagttgttgtttattttttttttttttttaatttagagtggtttgtgttttaagtggatagttgtttttttttttttggttttttgttgtttatgtttttatagaagtagggagaagaggtaggaaggtgatgtgtgattatttgttgggtgtttgtatagtgttgtttgtataggtgttattttttttatttgttattttttttgttgagtttttttttttttttgtagatgagagagtattgttttttagaggttaagaaatgggtttagagttatttagttgattagtgtgtagttagatttgaattatattttgttgatttttatgtttgtaggtttggtttgatgagatggatagttgggtggtggagattttgagattttggatggtttttaaatagggtttgtagtttttggatagggagagtttggtataaagggtttgtggagtgagttgggggagaaggtggtttagggtttttgtttttgaataaatagatggaggggttattttagtgtttttttagtttttggtgtgttgggtttttggttttgggaggagagaatggagttggtttttattttgggttgggttggtttgggtttaatttagataagttttttagtttgttatgagtgatatttttgtttgttttggtgtttttgttaaaaatatgaagggttttagaatttttattttggtttgttttttttttagatttggagtgggtttggggttgataatagttttatgttagatagtttgagtagttattagtgttattaggtttgatattgtggtttttgttttggagggaaaaataaggttttttttgggggattttttgttagtttgtgaaaataggtttggagttagttagtgtttttatgtttagatattttgtgtggtttttaaagtgtttttatgttgttagtttatatgattttttttaaaattttataagggagggtaggaagtttgagtaatagtttgttaagtatttatatagtaggtggttttattgttttttatttatagataagtaaattgagttttagggtggttattgtttgttttttaagttatttagttatttagttatggaagaggttatgattttttatattttagtgaagttgaagatttttttttttgtttttaaaaatgtttattttttagggtagtgaatatttggtgtttttgtttagtgtaagaggtgaatgtttgttatttttgtttttttttttttattagatttgattttttttttgtgatgggaatattttgtaggtagtttgttttgtttttatagattttgagaaatggggtttaaattgttggttgtgggtgggataggtgatattgtagtgaagaggtggagtatttttgtagtggggaagaaatatattttttttatttttttaggtttagtgtttgggggtttgtgaattaaatttatttaagataaattaatgagagaaaagatagatttaattatatatgtatgggattttattgaaaaatgtgatttaaaagagtaggtagaaggtggggtttgtgattggtttgaaggtagtgagttattttagttgattgtttatagttagttatagattagattttttgttttattgttttttttttttttatttgttttgttttttttgagttagagttttgtattgttgtttgggttggagtgtaatggtatgattttggtttattttaatttttgttttttgggtttaagtgatttttttgttttagttttttgagtagttaggattataggtatttattattatgtttggttaattttttgtatttttagtagagatagggttttattatgttggttaggttggttttaaatttttgattttgtgatttgtttattttggttttttaaagtggtgggattataggtatgagttattgtatttagttaattagttttaaaaaaaaaaaaaaaaaaaaaagaatttagggtttgtatattattttaataggaaaaaaggaaggggtgaaagtatatattatgggttgggtgtgatggtttatgtttgtaattttggtattttgggaggttgaggtaggtggattatttgaggttgggaatttaagattagtttggttaatatggtgaaattttgtttttattaaaaatataaaaattagttgggtatggtggtgtatatttgtaattttagttatttgggaagttgaggtaggagaattgtttgaatttatgaggtggaggttgtagtgagttgagattatattattgtattttagtttgggtaatagagtgagattgtgttttaaaaaaataaataaaaaaaaaaaagtatatattatggtaaaataaatgagtttttggaaagataaataggtttttaggagttgagatgggagatgtgaagttttgtgataatgtttttttaggtgtggtgtggaaattatttatattttttagggaagagttagttgtttttagggagtagatttgggtttgtatattattttaataggggaaatggaaggggtaaaagtatatattatgggttgggtgtaatgtgtttagtgtaggaggtagatgtggtttatggttgttgttgaaattagtgtagggtttgattgttttgtattgagtgttgaggattttggttttgtattagttatgagtttgtagttttgggatatatttgatgttggtttaaggggaaatgaggttggaggggtagggtggttggattggatgtgggtttggggttattgttgatttataaagtggttattatatgggaataatagagttggttatagattataattagtaatattatttaaaagtaaggttatatttttaataataagttatattttaagttattattaatttataaaatatattgttggtataatgatagttttttaagaaggatataaaaaggtatgttgggttgggtgtagtgatttatgtttataattttagtattttgagaggttgaggttggtggattattttaagttaggagtttgagattagtttggttaatatggtgaaattttgtttttgttaaaaatataaaaaaaaattagtttggtgtggtggtgtatgtttgtaattttagttatgggggaggttgtggtagaagaattatttaaaatttgggaggtggaggttgtagtgagttgagattgtgttattatattttagtttgggtaatagagttagattttgttttaaaaaaaaagaaaaaaaagaaaaaaagtaaaaaggtatgttgaaggtatttgtttgtggaaagttgtaatttgatgggaggtagggtgagtattttttagaaaggtggaaatgggtttttttgttatagagatttataaatatagattgaggtttgtagtttaggagatttaaaagaggtaaaggtgaataagagttaaggtttttaagttagggtttgattttgggggtgggggttatatatgatggaggatgttaggagggttttttggaggtggtgatatttattaggggggattttaggtggggtttgtgagatagtaggatttggttgaagagtgtaggttttttagataggagtgggaatttaggtttgaaaatgagttggttagattgtaggggtttttgaatgtaagggaagaattttaattttaatagaggagtttgggaagttgtttgggaaaaggagtgataaagtgggaggggttttttagtagagttttgtatgggtaggagggagtgagatgggaggtgggtgttggtaagggatgattttagtggtttaggggagtagttatagggtggaaattaattttgtggggtttgggtaggaagggattgatttgagatattgggaagaaatagttagtaggattttggtgagagggttgggggttggggaggggggtgtggagagtgggagtttgagtttttgaaaatagatagtgttttaagggggagatttgaggtaagatgtggagaggtagttgagttgggaagttggaatggaggtgtggttattttaggagattaagttagggggtgaggggatttttgggagttatttagattttagtattagggaatatggaggggagaaggaggggagaagaattagttggtgtgtgttaggtattgtttttgaggttagatggggtggggttggatattggttatgaggatttttttaagagttgggttaatagtgagatgggtggatattagatggtttgggttaagaagtaagtgggtggtgggaagttagaagttgtggtgtagatttattttgagaggttgggttgtttagatagggagaaagtttatagtttgaggaggtagataggttaaaggaagagggtttgtttgtttttgagattggggtattttgaatgtttttttaggttaagtgagaagaaattagaagaggaatatgttatttaaatgtgttgaaatagtttagtagttgtgttgttttatagaaaatgtgtagaggtttttttgttttattatgtttgtttggggatggtttttatttgggttatttagggtttttttagtttgttaatttaagggtggtaggagttgtgggtgtttttagtttttttttaaggttggtttgtgggtagaaatgtgggttgttttggggtgttatagttataaatgtatattagtttttagaattatatttttgttttttagtttttttttttgtatttttatgtagaagtgtggttgttagtttataaaggatagggagggatattgtttttggtatttgatgggaagtatttgttgtattttattggggtgttgtttaggatggattggaaaagagttggtaggaaggttgagttttgtgtttataatttggtttggtggtggttgaggagtttggtaggagtagagtgtaggatttgggaattgggggttggtgtatgtgtgtatgtatgtgtgtgtgtgtgtgtgtgtgtgttgggtgggtagggaggaagttgtgaaattatatttttttttttttgttgttgtgttgttgtgtgttttagtagtatgtgggtgttattatattttttagtaggtgttaatttttaagattgttttgggttttttttttagttggttgagttggaggtgggagttttaattgttttttgtggtttttagagtgggattttgttgtgggataggttggttaatggtgtttttttttttgtgatttttttgttgggtgggttatgaggaaggattgtgggtgttgtttatagataggtggatatgtggtaaggatattttgggattttttttttgatgttttttgaagggggtatttttttagttttgagatgagtttttgtggatgtgggaagtttattattttaagagtagtagttttggaaaatttaatatagaattttgagtaggggtgggaaggggttttgttttgtttattggttgtttggtagagttttgtataaggaagtgtttgtgttgttgtgggtggaggaatggattgagggttatatttgttttttgttgttgttgtaattgtttattataaatttagtggtttaaagtaatagaggtttttttttttatagtgttaagggttagaagttgattagttttattggattaaagttaaggtgttggtagaatttatttttgttttttttagttttgggtgggaggttttgttggagttttttggtttgtggttgtatttttttagtttttgtttttatttttttatagttttttttttttttgtagttagatttttttttgttttttttttttttttttttgagatggagttatttaggttggagtgtagtggtataattttggtttattgtagtttttgttttttgggtttaagtgatttttttgttttagttttttgagtagttgggattataggtatgtgttattatatttggttaatttttgtatttttagtagagatagggttttgttatgttggttaggttggttttgaatttttgattttaggtgatttgtttgttttagttttttaaagtgttgggattgtagttatgagttattatatttggtttgttttttttttaaaggatgtttgtgatttggggtttatttgggtaatttttttattttaatatttttagttatatttatagagtttttgttgttatatgaggtaatatagtttgggaagggagagttatttagtttattttaggggtttgtggtgtattttagggtttttttgattttaagatataaagtaagaaaataaattggtttaaggggaaaaaaggatatgttgaattttgttgttttaaatgtatatttttttattgtgttaaaatgtatagaatataaaatttgttattagtaatattgagtatatttatagtgttgtgtaattattagtattgtttagtgttagaatttttttattattttaaagggaaattttgtatttatgaaggatttattttttatttgttttttttagtttttggtagttattagaatgttttttgtttttataaatttatttttaataagtgtaattttgtgtgattttaaaataaataaatatgagtatgatgagttgtttattggaaggatatttatgtggggaggttggtgtgtggagtgtgtaggtttttggatgggtaggagttgaaggggtgtggatgtgttgtttttttttttttttgttttttttttggggttattgtttgagtatttttttttgtaaatggttttaaataatgttttagtttttatgtttgtattgttttttagttttaggattttttattaaaaaatattttaagttttagatttatttttgggaaaattttaatggttttatttttttttttgagttagttagattttatggtttgtggtgggttgtttttgagttttgagtatttgtgagttagggaagtaggataggtatatttagggaaggggaagagttgttgttagttatagtaattgatatttttggaattgtttaagagatatttagtgtgtgtttaaaatatttatttttttttttgtttgttttttgagatgaagttttgttttgttgtttaggttggagtgtagtggtgtgattttagtttattgtaattttttttttttgggtttaagtgatttttttgttttaattttttgagtggttgggattataggtatatattattatgtttggtgaatttttgtatttttagtagtgattgggttttattatgttggttaggttggttttgaatttttgattttaggtaatgtgtttgttttggttttttaaagtgttgggatgataggtgtgagttaatatatttggttatatttattttttaggagaagttttgtattttttgaaagtgaaatgtttttaggtgggtgatattgatggtgggatttgtggttttattagtgttttatgagagatgttgttgtgtgttttattaagttgtattttattgttttttaaatgtggtttgtagatatggtgttgagaatgatttgggaggtttaaattataatatggtttaaattaatagttttttgatgatttggtattattttaggattaaattgagattatttgaggatgggtgtggtggtttatgtgtgtaattttagtattttaggaggttgaggtgggtggattaattgaggtttgtagtttgagattagtttggttaatatggtgaaattttatttttattaaaaatataaaaagtagttgttggatatggtggtgtatgtttgtagttttagttatttgggaggttgaggtgggagaattgtttgaatttaggagatggaggttgtagtgagttaagattatgttattgtgttttagtttgggtgatagagtaagattttgttttttggtaattaaaaaaaaaaaaaaaaattgagattttttgagttgtattgtttagtatgatagttattggttgtatggggttatttgaatatttgaaatgtggtgattttaagtggagaggtgttgtgtgtgtgaagtgtattttgggttttagagttttagtaagggggaaagaaaagaatattaaatatttgttatttttatattgattatatgttgaattgataatattttgggttttgttaagtgaatgatattaaaattaatattatttgtttttatattttttaatgattttttttttttttttttttttttttttttttaaatatggggttttatattgttgtttaggttggagtgtagtggtatgattttggtttattgtaatttttgttttttaggtttgagtgatttttttgttttagttttttaagtagttgggattataggtggttgttattatgtttggttaatttttgtatttttagtagagatagggttttgttatgttggttaggttggttttgaatttttgattttaggtgatttgtttattttagttttttaaagtgttggtatgataggtgtgagttattgtgtttggtttgtttttatattttttattgtaggtgttggaaaatgtaaggttgtgtttgtggtttatgtgttgtttttgttggagggttggattgagggttagttgagaaggttttggggttgttttatttgaatgttgagtgtgtgttgagtggtagagaattttgagaagtgttgaaggatagaggttttgtgtgggggatgtagttttaggttggagatgttttttttgtgttttggagatttttatttggtgatagtaagaggaattattgtaagaggggtggttattttagtaaagtatttaggatgttggttttttagtttaggaatttagaggtagaggaggggaggaggttgggtttggaggagagtagggttttgggttttgggaaaagtttggggggttagaaagttgggggatagattgaggttagaggtaaagagaagaaggtttggagaggagggttaaggaagaagggttttgtttatggggagggagaggtttatggggtaggggtgtggtgggagttgtatttttgaggttttttgttgattttgatatttggttagaaaggagttttttttggtattttttgttagtggtttttggagttgttttttaggggttagtgatgagggtgttttgggttgggttgtagatagtggaaaagataggttttttttatttttagtgttggggaaattagttttttggaggaagggggagttgtattttttgagtggttgtattttttggtttagatgtgtgtgttttgttgtaattttggtgattggtgttggtggtgtttattttatggatggggaaggttaaattttatagatattgagtgataggtttagggttttggattttagtgtttgatttagaatttaggtttttgatttgttattagttttttttttatttagatgggaatagggattttgggtatgtagtttttttttagatatttttttggttttggtttggtgtttggagattagtagtagtagttttttatggttgtttattgtgagggtggggagggttgtgggattaggaggttttagggggaaagttggttatgaggagtgggaagtgatgggttagatgttagtgattgttggttggggagttgttggatgtggttggtttgtttggttagtgtggtgggtgttttggggttttagttatttttagttatgtgtgggggtgtgggatgggaaaggtaagagtgtgtggagtttagttagtatttaatatgaggttttgtgggggttgtttgagggtgtagtttttagaatttagtttttggtttttagaaggtgttattaaaggtttttttttatttgagtgaattttttttagtttttagtaagtttttggaatgagtttatttttaggtgtttttttttagtgtgggagtggttatgtttttgttgggagtgatttatttgggtttagaggttgtggtattgagatgggtttggtagattttagtgtttaggtttagtttttatagtgttagtttttttttttggggatttttttgtttgtgtttttttgggttttagtatattttaggtttgtagggagggggagaggaagagattgatttattggttaggttttttaggggttggagaggttggagaggtaggagttggattagatttgaatttagaggtttttggaggaagagtttagggtgagttgtgtttttattttttgtttttttttttttgtttttttttttttttatggttttagttagtaagtatttggggtagaggggataaatttaggtggttgtgttttagttttggttgtaggtttgaatggttttttggggtggttggttatgttttttgagagtttagttgtggtgatgtttgagtaggtaggtgggggagtatttaggaagtaggggtgttaggtagagtataaggagagagggtgtttaggttagttttaggatttggttgagaggagggggttttttatgggtattgtttttggtaagtatagggataagggtaaggatggtatggttagaggtttttgggagttttttttttttttttttttttagtagtttttttttattttttttagggattttgttatttttttttagtgtgtggtagttttttggtgttttttttgtgtttttaggttgtttttgtgttgggtttgttgttgggtgtttttatttttgtttgttttttttttttgttttttttgttttgtttttttggagtaattttttattgagtttttttttttaggtagttgaggtttttttttatttttgttttgtgttttgggaggttttttgttttgtgattataaagtttttttgattttttgtttggttttgagttatgtgatttggtgggtgggttgtggtttttggtgtgtttagtgtagtttgatgttttgttgttggggtgagttttgtttttttgttttttttagttttgtattattggtttgggggtttttaggtggtgtggttgtgaggtggattttgatggttatggtggtggtgttgggagttatgttgtttttgggttttggtttgaggttggtaggattgagtggggtttttaggagaggggtggtggggagtttgatttttatgtggggattagatttttggttttaaaatagaagaatagggttttgtgtggttatagttatttttttgtaaatatttggttaattaagttgagtggttaagtttttttgttgtttggagttttttggaatatgttttttttttgtaaggggtttttttggtttttaggagggttaggaagaaatttgaattggttattgttttttttaaaattattttgtttaagttattatttttttgggtttttgaagattggttggttggaggttggagatagttttaatgtttgaaatgttgtaattgaagttttttgtggtgttggtattgggatttagggagttgttgttatagtgtagttttggatttttggatgtgttggatatgtgtagggtgtttttgggaggagtggggagggagggtgttgttggtggggttggtttgtgtgtgttttgtttttttataatggtatgttgtgtgttggttatgtagaggtatgttagtgagtaggggttgagggatttttttaatggatttgtttttagagggtttttttatgttgggagaattttagagattaaattatgtagttaatggggtggtttttggttttaaagtagggaggggtgaggagttttgtaggtaatgttatttgtttttgaaatgttgttttagtgattttggggattgatttagtttttagtttgttgtattttatttttggtttttttttttttgtttttttatgtgaaatttgttgtgttttggttagaggtttggggaatagttttttgtttatttaagataagtttgtaattttttttttggagaaaaatatgttatttggaagtaggttgagtagtggttttttggtaggtttgtttggggttgtggagatagtatttgttggattaggatggagttggaatttggtttggattttatatgagaaaatttgttggaagaggaggaagtagaaaaaggttttattttttaataatgttgtgggttttttttttttatttattgttattttgttttgaaatttaatggggttatgtgtgtttttatgaatgttattttttttggttaatttttttggtagttttaggagtttttttttaggaaaaggaagaaggtgtttgtttagtatttagtatatgagtttttgttggaaaggtgggatttttgtttttttttgggttttttttaggttgagatgtggttaaggaaggtttgtggtgtggtttgttttttttaatgtttgtttttggagatttgagttgttgttgatttttagtttgttttttttgttttttggttatttttgtgttggggtggttgagatattattgtattggttattttgtgtttttattagtttttgtttttgtaggttgttattgtgatggtgatggggttaatttagttgtggtggggaggatttattgtgtgtgtttggggggtggtgtggggtattttgggatgagaagatgtgatttttgttttgagagttttgttttaatggaaggtgggggtatagttgtaggtagaagttattaagtattgtggttagattagtattttatgttaaaaatggttttgttggttgggtgtagtggtttatgtttgtaattttaatattttaggaggttaaggtaggtagattatttgaggttaagagtttgagattagtttggttaatatggtgaaattttgtttttattaaaaatattggttaatttgggtatggtggtgtgtgtttgtaatggtagttatttgggaggttgagataggagaattatttgaatttgggaggtggaggttgtagtgagttgagattgtgttattgtattttagtttgggtaataagagtgaaattttgttttaaaaaaaaaaaaaaaaagttttatttgggtttgggatttgttttttgaatattgggtttattgtgttttataaggatttttattttggaagttttagatttatttgggtaattagagtttttgggttgattattttttagttttggttagttttttgggttattgtatttttttaattttttgttgtgttatggttggtttaagttgtttttattagataatgtgaggtatttttataggaggggataattttgtttttaggagttttttttttttgtttttaggtttggtgtagtgtgtggtttttttgttggtgttaaaggttttaaggtttttttaagaagtttgttattattattagtagtttttgttatttggtttttttgtatatgtaagttttttttatatattttggatgtttagggtttttgttttttttttttggttgggagtgtgggaagagggttttattttaatgtttgagagtagggttaatggttagggtaagttgtgggggtttttttttgttggtttttttttgtagtttttattttaatatagagtattgatattatttgggttttgggaagatttggaggttgattattttggaggtttttagtgttttatagttattttttggggaagaggttttttgagggatttgtggtttttggttgggattttagttttagagttttgttttttggtgttgagttttgatttgtttattgagtgttagtttggtttttggataggtagggatttgtttttggagtttagtagagttttgggaagtttttttaggagggtttttgagggtggtggttatgtttagtttgttgtatgtgtgagtttgtttgatgaggaattggttgggaaggtgtgggtttaattataggtttatgagggttttttttgtttttatttaggaagtagtggagattttggtatatttagtatttgggtttgtgtttgtttagttgttggtggaattatgggagttttgttttggggtttgtagagtagtagtgggaattttttttattttagttttttttagagttggttgtttaaatttgttgttgtttagtttttttttttttttttttattaattttgggaattgtatattgtttattttattgggttttggagtgggtgtaggaagagagagtttaatatttagaggtttgggttttttgtaggtgtttgagttgttgtggtttgagttgggttttttgttggaattattatagtagatttaatgatttgtttgtaggagttgttttattttagttgattttggggttgtgggaaggggttgggttttggttttgttgggggtggggggttagtgtaaagggtttgaaaagtggtagaggtgatggtttatttgttttttttttggttggttggtttaaatgtgattggttttttttttttttttttttttttttttttttttttataaataatattaaatgtgatttgttaatgtatttatttgggtttagtagttggattatgggtagaagtattttagatttgttattttttttaagttaagggtggggaatattttttgtgagattttggtttttgagtgtttaagattgtttttggaattttaattttgggttggttttaggggattgatgttgatggagttgttgatattgatttttggtttttgtatggtttttaggaagggggttttttgttttttgttttgttgagtttggttggtagtattttttttttaggtttgtgtttttggtagggtttgttgtttttgttttgttttgtgggtgttaggttttaagtattaggtgatttggttattgaatggttattgaatagttatttttgttggtgtttttagtggaatgtgtatggatgtttttttttttttagatttttgttttttattttttagtttttgttttaggggttattataggattaggaggtatgtagatgtgggtggtatatttattgggtagatttagttttgaatttgtatgttttttttaagggggtttttagtgggtggggttgatggtgttgtttttttttttgttattagaatggatatgaggattgtgttttgttgatttatgttttgagtttttagatgttataggtgtttgtttaatgagtgtttgaatgaatggttagtattgtgtgattgtagatttttaatttttatttaaatagtttgtggtttttgtgaggttattttgagatagttttataagaatttttattttttttgtatgttttgtataaggtttttttggggggttttttagaaaaagggttaaagagtagtatttttttggggatttgaatatgattttttttggggtaggggattgttttggaagatttttggtattgttttttatgtgttatgtgattaggagggttttggggtaggatggtgttttttgtgttttgtgtgttggggttggaggaaatattgtttgtggttggtgttatttgttagttttgaagattaatgatgggttggatagtggttttattgagtgggagggagaattgttgttgtttgtagttggggggttgggtgggtgggagttgaggttagggagaatagtgtagatttggtatggagaggtttggaggaggagtagggggttttagttatttagggtgtagggatgttatatgaggagtaggtgtggtgtgtgtttttttgtgggttttttattttttggttttgttatttgtattaggttttgtggtgagagggtatagagtggaggaaggtgttgtggttagggtaggttatatgttgtgttaatggattgttgttatttgttgtttttgtggttttgttgttaggattttttagtattaggtttttattattaggtatgggttttataggtattattggttttttgaagttagggatagattttatagataatattgagtttttgtagttagggatgggtttttatggttagtattagattttagggattagtattgggtatttatagttagggataggtttttatggttagtattaggttttagggattagtattgggtatttatagttagggatgggtttttatggttagtattagattttagggattagtattgggtatttatagttagggatgggtttttatggttagtattaggttttagggattagtgttgggtttttatagttaaggataagtttttatggttaatattagattttagtgattagtattagatgtttatagttagagatgggtttttatggttagtattaggttttagggattagtgttgggattttggatgattgaaggagggtatggttgattaaagttgtaggagttagtttggttattttgaggtattaagttattattgtggttttaggggatttagatttttttatttgtttttttgaattttggaattagatatatttgggtttagtttttgtttttggggttgtgtgtttgggatggttgttttatttttttgaagtttagtgagatggggatggttgtatagggtttggtatagatggtatttgatggtatagggttatttgtttgtatttatatagttttggtttttgttttggttgtgtattgagagttttatgtttagatttttgttgagtttttaagtttttggttatgttttaggttttttgtgagaagtattattgtatggattatgttttgggattttattttgggttgggaagtttgttttatttttttaagttttttttagaggtgttttatgttttattatttttattgtttgaggggttagataggggaatttagtgtgggaggtttagaggtgttggagtagatgttaagtgagttttgtgtttatgtgttgggttttggtagatattttgaatgagttttttttttaggaaggagattggggttttagtttaagttgtggttttaaattttgtgattaagagtggagaaaaggtaagatttttttttttagttttttagaatagttgatagtggtggaaatatggggtttatattgaatttttttgtaatttgttgaagagaatttagtttatatttttaggggtggaggtttggttgatttggtagtgtgtttgtttttttggttatagtttattttggattgggtattttggtgtttttttttagtgatgtagtgaagttattatgatgtgtttagttggtgagaaagtgttttttgtaatgttttattttttttagagggtgaataagttttgtttattataaataattatttatagaatatatgaggtttaatttaattttgggttatggtagtgttttttgggtaaatttatgtgttattttagttagagtttgtgtttttataggttttttggatttattttgaaggggggttggattttttgtttgttttgatgagagggttgtaggatagtttttagtgagtttttttgagggttgtaatttttttttttggtatttttttgtttgttaggaatgttttaagtttttagtagaagtttatttattatagttgttttttattttgtttattattttttttgtttttatttatttagtagattttgtgtatagtttagtgtaggatttagggtgggaaggtgttttgggtgggttggagtaaggtttttagttagggtggggttttaaggtgggtttatagttaggattgtgatttgggaggtttttttttgttttgttttagttttggtattgttgttgtttttgtgtttagtggagatttattggttttaggttttaaaattttagtgaggtttgtagatagggaggagttttatttgagggtagagtgattgttgggtttatttgtttgttatgaattatgtggttttagatttgttatttttttttttttagagttatggttttttgtttgaaaaatggataatgatggttattatgttagggattattttgaggataaatggggatgaaattgaagaggtttagtatggaatttggatatagaagtgttaattgtgtgttattagttgtggtggttgttaaggtttaattatatggtagttatgggttgagtggtgggtgggaagtggggagtaggagtatgtaagatgggtatttttgaagtttttgatttagtgagataagtatatatttagttttaagatggagtgttttaggaaggtggagattgtaaaggttttgtggtgtaggagtgtgagttgtatttttgggttttttagaattttattagagtttagggaggaggttagtttagatataggggtaatgggagagatgggagtgagaaaatggtttggtgtttggaagtggagtttggaaaggtgggtgtggggatagaggagggttttgggggttatgggtttatgtgtttaggaggtggaggtagtgaatggggttatggttggttttatatgtggtattattagttttgttgagtttgtatttgttttttaggttttttgagtgttattattatttggtattttttggtttgatttttgttttttgtttgtttgggaagagtgagattatttgtttaaagttttttagttgtttttaattattttggttgttttttggttttgtttagggttagttgttgatttgaattgtttggtgttatttttttagatttttggggttttgttttggtattaatagttatttttatttttattatttatttgtatatttatttagtagtgttttttgggtatttatttagtaatattaaggtgttgagatgtggttgtggttaagatttgggtttggtttgtgaggattttgtagttgttatttttttagagtatagttttagttaggtatattgtggggtttagaaagagaaattaatatattgtgtttgtttattttgagttgttataaggaatagttgaggttggggggttatttgatttatggttttgtaggttgtataagtggtgttagtatttgtttggtttttggggaggttttaggaagtttttttttatggtagaaggtgaagggggagttggtatgttatatggtgagagagagaatttttagattttttttttttttgaaatggagttttgttgtgttagttaggttggagtgtagtggtataatttttggtttattgtaattttagttttttgagtagttgggattataggtgtatgttattgtgtttggttaatttttttgtatttttattagagatggggttttattatgttggttgggttggttttaaatttttaattttgtgatttatttattttggttttttaaagtgttgggattataggtgtgagttattttatttagtttttttagattttatagtaattagattttttggattttgtgattgtggggagggtattaaattatttatgagggatttatttttatgatttaagttttattttttttaggttttatttttaatattagggattatattttagtatgagatttggaggggataatgtttaaattatattatatgtgatttttttgtgtgtgtgttagtttttatatttggttaagtagtagaagttttttttttgttttttgttgagagagtggtgggggagaaatgatttagggatgggaggttggttttttgaggggttttggtgtttgtggagtgggagtgtgggaaggtttttatgttgtgtgtgttgtgttgggttggttttttatagtttattgtggtgttttttgaggattgttggggaggaaagagttaattaatttggggatttagttgttgaagttattattaaatttgagtagtttaggggtttttttttttttgggttttatgttatttagtatagtggggtttaattgaatttttttttattttttaaggtttttggttggtgtggttggggtttgggatatggggagtgagagggtttgggttttttttagatttggagtgggtttattagaaatggtttaggaaattgtgggggttatttttagtagttgggggtttttgtggttatttttttttggttttgttgagtagttttggtttttggagtttttagtaagggatgtgggggtttgttaggttagggtttttattgttgttgttatgtatagttgtattttgtatttggggagtggggtgttgagtggggtgtttgggaggtaggtttttttttgttttttttgtttagagattttggggatgagttgagtgagatttttttggtttttgattggttgtgtttttgttgttattttttattttttttaagtggaggtttatgatttttttttttatttaaaagggttatttagtgatttagtagattttagtttgtgttatttagggtttttttaaaaatttgtggggaggttgggtttggtggtttatatttttaattttagtattttgggaggttgaggtgggtggattatttgaagttaggagtttgagattagtttggttaatatggagaaattttatttttagtaaaaatataaaaaattggttgggtgtggtggtatgtgtttgtaattttagttatttgggaggttgaggtaggagaattatttaaatttaggaggtggaggttgtagtgagttgagattatattattgtattttagtttggatgatagagtgagattttgttttaaaaaaataaaaataaataaataaaaataaaaatttatggggggatttttgtgtttattggttggtgtgaggagagggtgaggagttgtagagaaggtattaggttgaggattgtttttatttttgggttatagaattgaaggaggggatatatgaaagatgtttttagatttgggttggaggttggggatatttgagggtaaggatgatgttgtttttgtttttgtttgtagaggagtgtatagggtttattagttttttgttgttgtttaagtgatagttttatggagatagaatttatatattgtgatgttgatttttttaaaatttatagtttaatggttttgttgtatttataaagtgattgtattagggttatttagagaaatagaattaatagaaggtgtgtatgtgtgtttagataaagagatttattattatgaggagttggtttattttattatagaggttggtaagtgttaagattggtagagtaaattagtaggttggagatatgggagagtttatgttgtggttttggtgtttatttgaaggtttaagatttaggagagttaatggtgttgttttagttttgagatttaggaaaagtgtatgtgttagtttgagtttgaagtaggaaaaatttgatgttttaggttgaaggtggttaagtgggaagaatttttttttatttaggttttgtgtttttttatttagatttttaggtttttgttataaaattataaagatttgattagaataaaatttgagaaaaaattttttttttttattggttttggatttattggttgggattttggaaattagattgatagagattaataggaaataagtataataatttaagtaagttttatttgatattgagtttttataaggaaatgaagatttagagaaattgttagtttgagtggtttttgttttgttttgagataaagttttattttgttgtatgtttaggttggagagtagtggtttgattatggtttattgtagttttgattttttgggtttaagttggggtttagttgttggttttgggagttgttttgaatttatttttaagttttagtttagatttttaagtagttgggattataggtatgtgttattttgtttggttaattttttattttttgtagagatagggttttattatgttgtttgggttggttttaaatttttgggtttgagtaatttttttgttttggttttttaaagtgttggggttataggtgtgagttattgtgtttggtttaggtttgaatagtttttatttgttttgtttgttttttaaatttgtttgttgtttgttttgagtagtttttttgtttattttttttgtttgttttttgtttaggttggagtgtagtggtatgatttttgtttattgtaatttttgttttttgggtttaagttatttttatgttttagttttttaagtagttgtgattataggtgtgtgttattatatttggttgatttttgtatttttagtagggatggggttttattatgttggttaggttgttttttaatttttgattttaagtgatttggttattttggttttttaaagtgttgggattgtaggtgtgagttgttgtgtttagtttaggtttgagtgtttttatgttgggtttgatgaagagtggaaagttgtgggaaattgtgatagagtaataaaagatgagttgaatagtgagtttgtgggggttttggtaagatttgtgtattggggttttttttagattttttgtttttggagatgaggttgtttttttttgttgggtgtagggagggtattttttatgtgaggggtttatgatttattttagagaaggggtaggttagtgagttttttttggatttgttattttttaaatttttttagttgaaaatatttattatgttaaggtattgtattttggagtgtgtgttttaagttttgttgtttttaattgattgggtgaggtttatttttattagagtatatagtttgttttatttaggtttttgattgtattttttttttgtttgttttgagaatatttattagtagtgtttgtggttgtagtgtttattttaagataaatttgttgggaagtattttgtttttattattatttttatattattttagtatattgattttggaaataaaagatattattttgtttatagtattttatttttagtagtggtattttttttaaaaaaaaatggtaatttttagttgggtgtggtggtttatgtttgtaattttagtatttgggaaagttgaggtaggttgattatttgaggttaggagttggagattagtttggttaatatggtgaaattttatttttattaaaaatataaaaattagttaggtgtggtggtaggtatttgtaattttagttatttgggaggttgaggttggagaattgtttgaatttgggaggtagaggttgtagtgagttgagattgtgttattgtattttagtttggatgatagagtaagattttattttaaaaaataaataaataaataaaatttaaaaaaaaatagtaatttttgattgttgaaaatgttaaattttagagaatatagtatttttataagtgatgttaatattgtttttgattagttgttggttgaagatttatttgatgaatttgatttttttagaatagatgatttagatgattttgttgttttgtttagaaataattgtaggaataatttaaaaaattttttttttttttaatttttttgttttttgagatggattttttttgttgtttaggttggagtgtagtggtatgattttggtttattgtaatttttgttttttgggtttaagtgattttttagttttagttttttgagtttagttgggattataaggtgtttgttattatatgtggttaattttttgtatttttagtagagatggtgttttattaggttgattaggttagttttgaatttttgattttaaataattggtttatgttggttttttaaagtgttgggattataggtgtgagttattatgtttggttagtttttatatttaatttttatatagagtatttagttagatttgttttagttttaaagagtgtgtttatgtaaaattaagtgagtgttggtagtgagttgaattttttaaaaggtaaaagggttaaatattaaatttatttaaaaatatttttatagatatatttagaataatgtttgattggttatttaggtgttttatagtttagtttagttgatatagaaatttttttttttttttttgagatggagttttgttttgttgtttaggttggagtgtagtggtgtgattttggtttattgtaagttttgttttttaggtttatgttatttttttgttttagttttttgagtagttgggattataggtgtttattattatatttggttaatttttttttttgtatttttagtagagatggggttttattgtggttttaattttttgattttgtgatttatttgttttagttttttaaagtgttgggattataggtatgagttattgtgtttggttgatataggaaattaattattatagttatatagttattgttattaattttagtatattttattatttttaaaagagattttgtttttattagttaatttttatttttaattttgggtttttagtttttagttattgtttatttgtttttgtttttatgaatttatttgttttagatagtttgtataagtggaattgtatagtatgtggttttggtgtttggttttttttatttggtagaatatttttaaggtttatttatattgtagtaggtgttggtgttttatttttttttatggttgaataatattttattgtggatagattatattgtgtatttttttatttgttgatggatatttgggttgtttttgttttttggtataattttgttgtgaagaattttgtagtgagtgttggtttataggtttttgtgtgaatatgtttttattttttttgggtaattgtaagattatgtggtttagttaattagtttttaagttatgtgtttgttgagggatttaggtttggtgggggtgtattgttgtgtttggttagttaggtgttgtgagtttgtgttgtagttatttttttgtgttgtgttttgaggttgttttgttggtattgggtattgtgagttttaggaggttaaagttttttttgttttattttgagtttaggttttgttttatgaattaggatgaatggatattgaattaatgtagggatgggtggggttggggtggggatgtagagtgattttgggggtttgtagttgggttttggttgttgatttttagttttttttgtttgttggagtttagaataagttagaaaggggaaatgtaaagtttgagtgttttttttgtggtagattggtaggtttgggtgggtgagttatttgtagttagttgtagtgtgagagaggaagtgggaggggagggagagggtgagtttggtgtaatttatttttggaaggaggttgggttgaggttgggggaagtgatttttatttttttgagaggatttttttttggggttaattttaaattaagggagataagatttttttgggggaggttggaagtgttggggtttttaggtgggtaggttttttagggttaatgttttggggaagttataagttattatgtttttggattgttatatatatatatatatatatatatatatatatatatatatatatatatatatgagtaaattgtaatataaatgtgtgtttatgaaagtgtttattttaaattattatatagtttgtaaagtgaaggttttggtttgtatttgggtatttattgtttagttagttggtaggtagtttgtattgtagtttgttattattttttagagatgtagttgaggagtttagttggtttggagggtttagtgggtgtagttttaggaaagtggttaggtttgggttaggtttttttttttttttagttttgggagaaattattatatgaatgtagtttttttttggagtttgggttggaagggtttgggaggggataggtttttattttaggagtttttaggttttggttgttgtttgtgttagttgtgtgagtgtgagtgagttaggggttattattgggtggaaggaagaagtgggtattttttttaggaggttattgttggagttttatagtaggttaattttaggttttgggtttttgggaggaggagaaagaagagaagtaggaggtgtggagggtaggttaggattagaaggtatatagggttggggtagtgtgggagattttgggggtttttttatttaattagttaatattatagtgtttataagaatatgttattattgtagttttattattttgttttgattttagaaggtataattgatgattttagggaatggagaatttgaggaaggttttgtaggagagggttagatgtgattgagtaaatgtgagttgtttgtaaattgtagagtgtatgtatagtattggttagttttggggttagtgtttttttggtgtttagtttggtttttgtattttttagtgtttggttgggttttgtgggggttagggttgggtttggtatattagaggatttttattaagtttttggtagtgttttagttattaaatttagtttgttagttattaaatttgttttgttggtttttgaattatttttttgttggggttggttatgttatgttaggttttttatgtaggatggtagatggatagatgttgggattaagttatttttgggttgtgagatgtttgattttttgttggtgttttagaagatgttagttttttgtggtatgttttttatgtggtgtttggggattagtggtttttaaggggtttttttgttttagtgtggggagtggtttggttaaggttttagtgtttggttggagttaggtataggtttaggtgtattggttggaggttttttgtttatgggttttgtttgttttgtgtttttggtttttattgtgttttttgtgtttttgggagagattttaggggttttgagtttagtattggggttggggagtgggtggggaagagggtggggattagggtttttggttgtagaatagttaggttttaagtttttattttattttttttttattgggtgttttattttatattgattattttttgaagaaaattttttgaattggttttttattttggttgttttaggaagtttatttatttttttgttttaatgttttgtggttttagaaggatggtggaagttggaaattatgagttttatttataggtggttatatattgaagttgtggagatgttgtgggaaaggattttggttagtgtggttggtatagagggagtggtgttattggggtagatgggaattgtggttgtttttatgttggtttgggagagatgaggggttggatgaaaggatagtagattggttatttatttatttatttatttatttatttatagtgttttattgggtgttttggatgtgtaaggttttgtgggtagtgaatgtgatagattttagatagtaattggagggttatgtgtgtaagaattgagggatttaggttgggtgtggtgttttaagtttgtaattttagtattttgggaggtagaggtgggtggattatgaggttaggagattgagattattttggttaatatggtgaaattttgtttttattaaaaatataaaaaattagttgggtgtggtggtgggtgtttgtaattttagttatttaggaggttgaggtaggagaatggtgtgaatttgggaggtagagtttgtagtgagtttagatagtgttattgtattttagtttgggtgatagagtgagattttattttaaaaaaaataaaataaaataaaataaaataaaaattgaggaatttagtgtagatgagttattttgggaaaataagtgggagttttaggaatagtatggggaagggatggttttggtagggaggatttttgtgggtagttttgttggaagagttgaaaggtagttagagaggttgtgtgtggatggaagttgaagagtaggttaggggtgtgtgttttgttaataaagattttaagtatttattgattaggtataatattatgtgttttataaataaatattttatttgatttttagtatttttatgagatagatgttattattttattttatatgtaagaatattgaggtatagagtggttaagttatttgtttagggttatatagtatgttggtggtaggtaggattttggagttataggaatttggtatattttaggtgtaatggaaattagttatggttttatagagggaaattattagattagtaaattttatatatgttttttggtgttttgaggaggagggatttggataggggtagttaatggtggtggttgtgagatgtgttgggttaatattgatgagagtttgggatggatgagtggatttggagtaatggaaatggagggtttaggtttggtttttggagatttagttgtaatagttgttggttggagaggttgtttatttagatgggggatggggtgggaggtaggtgagatgagagttttagagtttagtttggggtatggttattgggtttaagatgtttttagatgttggggtttgatagtgatagtggttgtagatatttaggatttagtagagggtttggtatagtggggtttagggatatgtttgtgagttaggttggtatttaagtgtgaatttggataaagaaggtggtattgttggtattgaatgtttaggggttgggtgaagttagttagggagaggggtttttaaggtattaggattgattttgtgggtgagggtggaggaggagatggtagaggttgagagaatagttagagataggaggaaggttagtagagttatgtatagaagtttggagaagatttgaggaaaggaagggttgggtggttgttattttttgtagttaggaggtaagggtgatttttgtgtgttttattttttagaggattggtggttttatttggttagaattttaagtttagagatgtatttgagttttatgttatggtgtaggtagtaggagttatggagtaggtttgtggggttatggtttgtttgttgttttttggtgtttttattttgagtttaggggttgtttggatgttttgtgttgtatttttttaggtggtgttttagagaggatgaaagtggttattttaaggtgtgattaggtagtggtttatgtatattgtttttttttggggagagtttgggatggaagggtatgtgtgtgtttttgagattttttgaataggttttatgtatttatttatttattttattatttatttatttatttatttatttatttatttatgtatttatttatttatttatttatttatttatttgttaatttatttatttatttatttatttatttatttatttatttatttatagttatttatttatttatttatttatttatttatttatttatttatttatttatttatttgtttatttatttatttatttatttatttatttatttatttatttatttatttatgtatttatttatttatttatttatttatttatttatttatttatttatttatttatttatttatttatttatttatttatttatttatttatttatttatttatttatttatttatttatttgtttatttatttatttatttatttatttatttatttatttatttatttatttaattatttatttatttatttatttatttattatttgtttatttatttatttatttatttatgtatttatttatttatttatttatttatttatttgtttatttatttatttatttatttatttatttatttatttatttatttatttatttatttatttttttatttatttatttatttatttatttatttatttatttatttatttatttatttgtttatttatttatttatgtatttatttatttatttatttatttatttatttatttatttatttatttgtttatttatttatttatttatttatttatttatttatttatttatttatttatttatttatttatttatttatttatttatttattaatttatttatttatttatttatttatttatttatttatttagttatttatttatttgtttatttatttgttaatttatttatttatttgtttgtttatttatttatttatttatttatttatttgtttatttatttatttatttatttatttatttatatatttatatatttatttatttatttaattatttatttttatttttattttagaaagtatttgaagttgttggggtgtgtatttggaaaatgtgttataagtttttataggtttttttttggtttttttatttttttgattggttttttttttggatatgtaggattttgagtagtttttttgggaggtgggtgtagtttaggtaggttgtttgtaaagttaggattgagggagttatatttaaggtattgtgggtttttaaggtgatggtattgtgggtttattgtttttagatttttttaatttttaggtttttgagtaggaggatttttggggtagggtttggagatgggaagagaaaataattttagttttttaatttttgttagtttaggtgggtgttgtatggattgggggtatttggaatagttggtttttttattttttttttttatttttttagtttttttggttataattagatagttgtgtgtgatgttttttttttttttgaaggggttatttagttaggtttttatttatggtttaggaatgtgtttttttttgtttgttttttatttttaagtaggttgtgtttttagttttttgttgtttttgaagggtttgggtatggggtagtttttgtagtatttttagggtttgagttgatttgtatagtagaagggaattgggggaaagttttttttttatttagtatttggtagggggttattttgttgtattttagagatttttgtttaagttttgttattttagatgattttataagttgggggaggtggagttttagtttttatagtttttgttgttgttttattgttgagttttgttgtgtatttgttgataggtttgttgatagtagaaggggttggagagagggaagttttgggttttgttttttttaatttttgtttaggggatatttttgataagaggaaattttagtttgtgatagatggttagtgtttatttatttatgggggaatttttttttttttttgtaagtttgtagatttgttaggaattaaaggaatttttggttgataggttattgtggatatggttggagggttggtatgggttggattttggggttgttttgaggtaggggttgtttttgttggaaggttttttggggtggggaaggtattagggttattttttgattttttttttgtagtggatttattttagagtttgagataaggtaagggggtagtagaaaatagaatataaaatagttttttttattatatattgtattagaagttagaggatttatttttggtttgttttttttgtagtttaagttttgagagtggttttttaggaagtgaatggtgatggtttgtaggttagagtttgttttggtttaagattgatgttttaataggttgtggagtttgggtgaaaaaatttaggttagggaggtggtgggttgtaaatgaaagaatagaggagggttttttttagaaagtggtgggtggtgtgaggagtttttggattttgtttaaatttgattttattgattggggttaattgaaattgtgttggtagaaaggtaaaattgtttgagatttttttttttataatagaggagaggtttgtttgaaagggtttggtgagggaaaagttggaggaattttggttggtagtaaaagtggggatttttgttttttgttttgggggtgttttggtttttgaatgaatgaaagaggaggttggatggagatagatttatattatttgttttttttaggttttgtaaaggagtatatagggtttttgttggtttttttattttgttagttattaagaaggagaaaatattaataggggaattgtaaagttgtagttttgtttaagttttatagtggaaattggaaagagttttagtttggagaaaaatgtagttttttgtttttgtaaatttgtgtttttttttgggaggttagagttattgtgtttgatttttaagtagggttttagagtgttttaggaggggaaggtagagttttagatttttggtattttaggttttaattaggttttgaggagatgttttttgttttatataaagtgtgaagtgtaatttgatttggagttagttaataaattagatgagttgtgtgtattttaaaaatttagtttttgattttttatttatatatatttgtataatttggttatttatatttagtgtttttatttttagaagagaataggaagtttttagtgatatttatggagtgtttgtagtagtttgggtaggttagtaggaatataatgtagtgaaaagtagagttgagatgggaaaatattttgtttttagagttttttagggatgatattttttattgtttttgtttatttgttttggagtttattttgtaaatagtaatttgtttttatttgagagtttttttttgttggagtttagggatggagagtagttggttttagttttttttttttatttttttgttttttagatttattttttattttgaataattgtttttaatttgtttttttttttttttagttgtagaatttagaattttgtgtgtgtggttaaaagtttagagagtgttgtaggtaatgttgagataattttattaaattttgtaagtttttattatattaagtttgtttgttttttttaatttttattttattttattttattttatagggatggggttttgttatgttgtttaggttggttttgaatttttgggtttaaatgatttttttgttttggttttttagagtgttaagttatttttttaattgggatttatgggtttagggattttttgatgaattgtttaaaatatgtgtgtgtttgtttgtttgtttttaatgtatatttttttagggagagtttttattttttattagaggtttgtggtatatatatgttttgtattattgtattagattgtgaattttttatatgttaaagattgttttaaatttgtttggaagttttggttaataaatatttaaataaatgaattttaaatttttatgtgttattattgtttttattttgattatttttaagtttgtagtgttatttttttgttattgtgaagtagatatttaataaatatttgttaaatgaattaatgttatggttttggtttattaggattttaggattattgtttattattattgtttatagtttttttattattttgttttagagtagttttttttttgaggtttgtttatttttgtatgtgtgtttagtttttagttttgttgttttattatttttttttttttatttgtattttttgaattgttaatagttaataatagtttttttttttatttatttatttatatttgaagtgagaagttattattgaggtttttgtggattttgttagtttaatttggggtggttttttggaggtggagtttttagatgagggatggatattttggtgtttgttgggtagatttatttgggagttttggtaggggttttagggtagttttgtttttttattttggttgtgggatttttggtgtattagggttttttaagtaagtatttgtgttttgggagagttataggtaggtttgagagggtttttggaatttgggatttttagtttggtttagtagttggtattattattttttttgtaagggaagttatggaaattaagatgttaatgtgttttgataggtttggggtggttttaagttttgggaagagttttggtaattttttttggttggtgggtagaatttttttttggtagtttagggttttgtttttagttttttgggggagagtaattgagggaggagttggaggttaaggttttagtgttgagttgtttgtattgtagttgtattttttgggttttggttgtaggaattttatatttttttagtttttttatggtttttgaagatttggtttggggagggggttagtagtttggggtttatttatttggttttaaattttggttttattgtttatttgttttgtgatttttataattgataaaagtttttttggttttggtttttttatttgtgaaatgggataataatagtggttattttataggattgtgtgatgatttattagttataatagtttttgagtagtgtttagagtaatatttggggtttggtgtagtggtttatgtttataattttagtattttgggaggttaaggtgggaggattgtttgaggttaggagtttgaaattagtttgattaatattagtgagatttattttttaaaaaaaaaaattagagtaatgtttggtatagagagtttttagtaaattttggttgttgtgatgagttttgtttttttatttgtttatttatttattagattttttgttggggtttgttgtgagttttatgttgttttgaagaaagttgggttggggtgagtgtgatggatgaggtgtttggttttataaattttgtgtgggggggttgtggtgagaggaaattgtatatattattatttagttattattgtggggagattgtttggatgtagagagtaggttttgtgtgggagtggggagggtaagttttggttgtgaggtagggtttttttaggatttagtagggatttgaaggattttgtaggtatttagggagataggagaggaggagggagtagttttggttggatattgtttttttagtattgtttgtattagggatttatttagttttaagaagtttttttgtgggggatagggagtatttgttagtttataggatttgaagtgtttttatgggtttaagtttttgggaaggtttgtaggtggttgtagggttgttgtaggggtgttggttttagggtttggatttaggggagtttgtagagggagggtagttggaggttgttttagtgtgtattgttatgaggtaaagtaaggagattgttgggtttatgttgggttggggtggatggaggtaaggaagtttttgttggggtaagggtattagttgtagatgttggtagtttttttttggatatgggtttggaaggttgatagggtgtggtgagtgttattggtttttttgttgtggtttggttagtggttttataggtttttgtgggtaggaggaggatgattttgtattttgtttggttattattggtagtgatagataaggtgtgtggggatgtggttattttggtttgtgttttgagagttaggtgtgggttgggtttggggaagataggggaatggtattgatttgattttgagtattttgttttggggtgtaggtttggttgttatttttttggagttgggaatggtattgggtggtggtttagggttttttgttttagtggtattatttttgtatttggttagtaaggttgatgggatttgtgtggatatttttgggatgtagattaggtagtatgatatatagggaggggtaggtagagaagggtggtttttgggttttggtttttaagttaggttttgtaagtttgttgtgttaagtttttttttggtattaggttaggtgggttagggttagttttggggttgtgatgagtgtgagtgtttttaaagtgtgttatgtttaatagttgttttttttttgggtattgttttttagttagatattttatagtttttgttttagttatagatagtaatttgatttttttatttttggtaggttttggggttggggtaagaatttgttattaagtgtagatgtttttagagggtgttggtttagggttgtgtggattatagtttttttatttttgttttagatttatttgtaattttggagaaaagatggtttagtggatgtttgtggggaggagggagttggtttttaggatgagtagatttgggggtagtttttattatgggattggtgatttattgttattagtgttagtgaatggtagaggggttttggtataaggtttgggtttagaatgggaatttgtagagaaattgttaaggttttttgttatttgatatttttgtttggttgttattttagaaatatttttgttgtaagaagatgggggagtttgtttggggtatggtttggtgatattaatttgagaattttaggtttaagtgttggtttttgggttttagttgttttttgagttgtaaagttggtttttgggtatttgtggaaaatattggattttttattttattttattttatattttgggatatatgtgtagaatgtgtaggtttgttatataggaatataagtgttatagtggtttgttgtatttattggattttttaatttagttttattagaaatgattgttttttttttttttttttgttttttttttttttttttttttttttttttttttttttgtttttttttttttttttttttttttttttttttttttttttttgtttttatggggatataatttttatattatattatttgttgatttagaaagtatagttgagtggtatttttttataattttttataagtattatttttaattttagaatgttttttttattttaaaaggaaatgttatttttggtatatagttatttttttttttttagtttttggaaattattaatttgtgttttgtttttatagatgtatttattttgaatatatgattagaattttaaaagatgtgattttttgtgtttggttttttgtagttggaatgtttttagagtttatttgtgttggtgtatgtttgtgtttttttatggttgagaaatagtttgttgtgttgatttagtatgttgggtttttttatgtatttgttggtggatgtgttagttatttttggagttgggtgtgttgtgttatttatgggttgtattaggagttggggatattattgagtaagttatagttttgggtatttaggagtttgtagagtaggagttgggagggaggttaggaggtgtatggtttgtttgttaggttggagagatttgtaaaaagttattttgagttagaaattagagtttgaggtttttgatttttagttgtggagttgggagggaagttttgtattttgttttgattgtggggtgatgtgttagttattgtttaaattagaatttttttgagagttgatgtgggtattgttgataattagtttggatatttgaaagaatggaaagtagggatttagatagatttttgtataattgtgtttgtagtagggtgaggtttggaggtgtgatggggattttaatggggtagttgttgttttgttggagtttatggtttttggggggggttataggtgttaattgtatattatataagtaggagtgtgaaattttagggttgttaaatttagtgagggttttgtgttggtttggttatttatagtggtattttaggaaaaaaaattattttatggattttagtttttttattagtaaagagtaggttggattggaattttgtattatttagtatagttgttatttatgaaatgtggttatttaaatttaaataaaaatagaaattttgttttttagttggattagtttagtgttaagtgtttagaagttatttgtgaatatattgtggtaattttttaaaaaatgaaaattagaattattgtagtattttataattttatttttgggtgtggatttaaaagaatgtatagtattttaaagagttagagatatttgtatatttatatttatagtggttttgtttatagtagttagtgggtagaaataatttgaatgtttgtggttaaatgaatggagaaattaaaggtgggataggttgggtgtggtggtttatgtttgtaattttagtattttgggaggttgaggtgggtggattatttgaggttataagtttaagattagtttgattagtatggagaaattttgtttttattaaaataaaattagttgggtatggtggtgggtgtttgtaattttagttatttgagaggttgaggtaggagaattgtttgaatttggggaggtagaggttttggtgagttgagattgtgttattgtattttagtttgggtaataagagtaaaattttgtttaaaaaaaaaaaaaaaaagggtggaatatataaggaatttgatttagttgtaaagaggaagttaggatatttgtaatagtaagggtgaattttttgggtattatgttaagtgaaataatttggttataaaaggataattttgtaggattttatttatattaggtttgtagagtagttagatttagaaaaatagtagaatggaggttgttagaggtttgggggatggggttggggagttgtttaatgaggatagtttgttttataagatgaaaaagttttggagatttgttatataataatgtgaatgtatttaatattattggattgtatattttaaaatagtgattgtggtaaatgttatgataattaaaaggaaaagttatgtggttagtggttattatgttgagtagtgtaggttttggatggtgttgtggttatagataatggagtgggtgatttttattattgtttttagttgtttgagtattatggtgttttggggttaggatgaaagtgtttttgggtatgggggtttttgttttttttatttgggagttttgaaggtagattttaaagtttatttggttaggtaggagagtgaggtgggtttttgtattgttttttgtgtgtgtgtttgtttgtgggttagttggggtttgtaaggttgttttttgagggaggggttgtaggaatggtttttatttgtgtagaaggtaagttattgttttatgttaatggtaaagatggggtttggttgtgttgtattattattttttaagtggggtttttggtgggtaggatgtttggtttgatttgagtttttgtagtgagtgttggtgtttgtggagggatttagttgtagttgagttggttttttttttgttttgggttttaggggtgttgggggtgagaaaggagagtttagggggtagtgtttttttttaggttttgttggggagggttgagggatgttggggggaggtgggggtgggtaggggttggttttagttttaggtaaaatggtttttagatttataggtagatggaagtgatttttggttatgtgggtggggattgaattgttgttttgtaaggtaaggttttatgtttggttttaggaagtggttttaaagttatatggtttatggttagatgtagggttgtgtttttgtttatttaaaggttttggaagtttaggggagagtatttttgaagggggagtaggagtaggagtaaagttttgaaggtttttaggttgtgtggtttgggtgggggttatgtgggggtatagagagaggagttttggtttttaggtttgtttgtgggtattgtttttagtagtggagatgtgtggatttttttttggtattttttaataaggaattatattgtttttttgtttttttaattttataagataggaatttttgtgttttgtggaggttgagaagatggggaggtgtttgtgaggataaattagtttttagtttttggtttttagagttttttttttttttatttttgatgttttaggtttggggagtttttttttgatattttttgattgttttagtgaaataggttgagagggatggtttgaattggttggggatgtaggttgtagttagggggtttagtgggtattttttgagtttggtttttgttttgtaagtggaagggtagttgaattgaagttttttattgttttttttggtttggaagtttgttttttattttttgggtagagtgaggagtgggtgtgggttgggagggttgttttttgtttgggagggttgtttatttgtttgttatgggggatgagttttttgtagttttttgtgttgtggttttggtttttatgttggttttatttttttgtggttgtttttgttgggtgtttattggttttagggaaaagttattttttttttggaggattggtgggaggggttttgtttgggagtgtgttgtgtggtttttgttttagtgtaggatgtttgaggttagattttttttgggaggtaggatggggtaaaagtttttttgtaggtagagtagggtttggatgggtttaagtagggatgggggtatagaatagtagttgtttagtttgtgtgggagttgagggttattaagggtagttttagtttgtggggattagtagaggtattatttttgtgattagtgagttgtttgtatttgtatgtgtatgtattagtgagtgtggtgagtttgaggtgtgttgggatttggtttgtgtattagttagttttgatgggaattagttttattttgggtatttttggaattttattgtgtgggagtatttgggtttttagtaggtgttttttgggtgtttgtttttagttttaggtttttgatttgtgtgtggtgttttaatagtagttaggagtagggttattgaagggatttatagatagaagaggttttagtgattttgggaagtttagttttatgtgttttatatatttaagagtaaaatttggttttggtttgtgggtgtgtagtttgtgggtgttggttaggtatataagatggttgtttgggttagtttagggggaggtagatgtggtgtaggggttttttttttttatgagtttaggaatagttttgtatttaggtatttgttttgtatttagtattttttttttttttaggattgttggtttgttttatgggattgaatatataattttatggggattgatgttggttttattttttttttttataagattatttatggggatgtgggaggtggggatatatgttggttttatttttgttttttataagattattttttttgtgttttggtttgtggattggtttttaaggtttttgagtggtagtaggtggtatagtttatttgagtagaggtgaaggagagggttaggtttatttgggtggtttgaggtagtgtggagggttaggagaggagagtattttttatttttgtttgagtagttttttagggtatggagataggagtttagggttagttttgttttggagtgtagggggtttttagtttggtatagtttttagaagaggagatgaaaaagtttggttttgggagtttggggatggagttttgttggggaggtagtgtggttgtaggatggtagttttttagaggatattatggttagggatatttatttgggggaatttttaggggttgtttgggtaagttgtttagtttttttgagttttagtgttttagtttttttatttaaggatgggtgtgataattatttggtaggtgtttgtgtgtgagtttttgttttgttttaatttttttgttgttttttttttagttattgaggtggtttttagttgtgttggtgatatggttgatatttttagagatgttgggtttaagtaggtgtttgtattatggaatgagaaggttttggtggattttggttatgtggggattgattttattttggagtagatgtgttggaaggttatgaagtagggttttgagtttaatattatggtggttggtgagtttttattttgtatgttatttaattaatgttggaaattagttttagtttttagggtggtttataagtttttgggtttggtttttttttttgtaaaatggggtagtaattttgattttaaggatggattgttagtgatattgtgtgtgtatgtatgtgtttgggaggagtttatagtttttagtggttttttagaggggtttgttttgtatatttagggtttttgagatgattttggggagtttaggttggtttggagtaggttttgatgagtggttgttgtttttgagtaatgatgttagtttgtgtagagggttttgtggtagttgtttttttattgttgttttagtttggttttttaggttttttattgtattttattgtattttggttagaggttttttagtagtttagttttagttttgttttggaattggggttttgtggtttttatattttttggtggttttggagagttggaggttattatgggaggttgttgattagtatgatttgggtagggtgagggggttaggttggagtttatagtgggttgtttgttgtttttaaagttttttaggttttatttaaattttatagggattttgtgaagggggtgttttgttttttaggtagaagtgaggtttagggaaggttgttaaggttttttagtttatagggtagagaattgtagttattgttttgatttttagaattgtgttttgtttattttatggggtttagggaggggtttggggaagtgtttttgttaggttatattttaaataaaggtgagtttgtggggtttttgtaaggtgtttgggtattttttaggttgggtttgtttttttgatttttgttagttgtgtatgttttttttgtttagttttgtggatgtaaatttatatttgttagtttgatatttttttttttttttttgtattgatttgggttttggtttttttggggttttggtgttttttttgttttttgtagttttatgggatttggttgtttatggttttgttgtgtttatagttgtttggaagttggtagtttgttttaagggagggtggaggtgtggggtttttttttatggtttttattttgttttgtttgttgtgggggatgtgtttgtattttgaggatttagggttgttttttgggaagatggttggagagaaagagaggggagaggtttaaaggtagtggttaggttgggatttatttttgtgggttatggaggggttgttttgttttttagttagggatagggtgagaaggatttgggaatttttgtgttttagttatggtataggtttttttttggagttttggttttaaggagagggagaggtagtttagtagtttttgttttttgtggttgttattgtgatagttttgttttttgggaatggtgtgtaggaggttattttatttgtttgggtttttttgtttttttaattttgagaagaatagtggttttgattttttataaaattatttttttttagggatgttgagtgaggaataagatgtggggtagttttgtttttttttttttttttttttatggtagttgtgtttatttgtagaggtgtaggtaaggtggaggggtatttgtttggaggtttatagattttggggagaattttagttttgttttaatttagtggggtgaggtttgtgtgtttttttttgggttttttttttgtgagttttagtttttttgtttataaaatgggattattttataaagtgagattaagtgagttaggttttgggtagggtttttaataggttgtggttgtttgagaatttgtagtagtggtgatggtggttgtggtgatgaggatgatgggggtggtaatgatggtgatgatgatggggtgatggtgttagtggagatgatggggatgatggtgatggtggtggtgatagtggtgggatggtagtggtgatgtgggtgatggtgattgtgatggtggtggtggtggtgatggaggtgatggtgatagtgattatgagggtgatggggatggtggtggtggtgatggtgatagtggtgggatggtagtgatgatgtgggtgatggtgatggtggtgatggtggtggtggtgattgtggtggtggtggtgatgatggtggtgatgatggtgattgtggtgatggtgatggtggtaattgtgatggtggtggtggtgatggtggtgatgatggtgattgtggtgatggtggttatgatggtggtaattgtgatggtggtggtgatggtggtgatggggatgatgatggtgattgtgatgggggtggtggtggtgattgtgatggtggtgatgtgggtggtggtggtgattgtgatggtggtgatgtgggtggtggtggtgattgtgatggtggtggtggtggttgtgatggtggtgatgtgggtggtggtggtgattgtgatggtggtgatgtgggtggtggtggtgattgtgatggtggtggtgatggtggttgtgatggtggtgatgtgggtggtggtgattgtgatggttgtgattgtgatggtggtggtggtgatggtgatgatggtggtgattgtgatggtggtgatgggagtgatgttggtgattgtggtggtgaagggggtgatggtggtgattgtgatggtggtgaagggggtgatggtggtgattgtgatggtggtgaagggggtgatggtggtgattgtggtggtggtaatggtgatggtggtaaaggggtgatggtggtgattgtggtgatgtgggtggtggtggtgatgtgggtggtggtggtgattgtgatgggggtgatgatggtaatgtgggtgatggtgattgtggtggtggtggtgatggtgatgattgtgatggtggtgaagggggtgatggtggtgattgtgatggtggtgattgtgatggtgatgtgggtgatggtggtgttgatgggggtgatgatgttagtagtggtggtgatagtgatggggatgatggtggtgttgatggtgatagtggtgggatggtagtggtgatgtggttgatgatggtgttggtgttgatgattgtgatgatagtggtggtggtgatgagggtgatggaagtggtgatgatggtgggagtgatgggatgatggtaatagtagtgatggtattgtgatgatggtgttgatggggatggtggtgatgataagggtgatgatgatggtgatgataataataaaagtaataataataaagggatatattttgtagtattttagttggtattttttagatttaaggtgttgtggttggaatattgatataatttttgatttgaggttggttaggatatagatttggtggatagagagagatggatgaggagtgtttgtttttgggttattaaatagtttaggttagggatttttagtattagtttttgtttttttaggagtttatattttttttagaaaggtgttattaaagttagaatattagtgtaatttagggtgttttttgtgttgtgtttttttgagatagggttttattgttgtttaggttggagtgtagtggtatggttttgatttattgtagtttttatattttgggtttaagtgatttttgtgttttaggtatgtgttattatatttggttaatttttgtgttttttggtagagatagggttttattatgttggttaagttggttttgaatttttgattttaagtaatttattttttttagttttttaaagtgttgggattataggtgtgagttattttgtttggttgatttttgtttttttaaaagatagggtttttgttattttggagtggtaatgattttagtttattgtagttttgtatttttgggtttgagtaatttttttattttagttttttgtgtagttgggattataggtgtttgttattatatttagttaatgtttatattttgatgtagagatagggtttttttgtgttgtttaggttggttttgaatttttgggtttaagtaatttttttgttttagttttttaaagtgttgggattataggtatgagttattatatttggtttagggtattttttttggtgtgttgttagtgtagtttaaggtagttttgtgtagggtaaagtaatggggttttgagtttggaggggtgtgtgtgtgtgtgtgtgtgtgtgtgtgtgtgtgtgtgtatgtgtgtgtgtgttatatgtgatttgtttgtgtgtgttgtgagagttgtgtgtgaggtatgtgtaagaggtatgtttgaggtgagttgtgtgtgtgttgtgagttgtgtatgtgaagtgtgtgtgttgtgaggtgtgtgtatgaggtgtatgtgagttgtgtgtgttgtgttgtatatgaatgttatttttttatttttgtttgttttagttatttgtggattggttgtttgtatatatggttattgttttttgagtggtattattttgtaggttagtgttttttagtatatggttttatagattttatgggatatgtgtgagtttgtttgatgtttatattagttttatgggggaaggattgtttattttattttgtagattaggaaattgagatatggtgaggttaggtgatttgtttaggttttggttggttagggaggagtagtttgaatatttgggttttggttgtaattattttggtgaattgtaggaattttggttatttggtgtattttgggtagttttgggtttttttgttagtttggtttttgttttgtttaaaatttgagttattaggagattttttgtttagaaagtataaggggtataagagatgttgatttttttaggtttggtttattttttaggagaggattgtggtttgggttgtgttggtattagagtttggttgtgtgggtttatatagttattggatatttggtttgagggtgaagtttttgggggttgtttggtagggatattgttgggaggtagtttaggtattgttgaattttagattggagagttttgtgtttgggtgggaggggttttatgtgtagattttgttggtttttttggagagatttttgattggttttttattttttttttagggtagagtggtttgggtaaatttattttaattaatattttttttaaatttaaaattagttggaagttggtgtagtttattttagaggagtgtatttttaagattattgagattaagtttattatgtatggttagtggttgggagtgggttgggggtgtaggatgtttttgtttttttggagtataggggttgggggttaagattattatatatagttagtggttaggggtgggttgggggtgtaggatttttttgtttttttggagtatagagtggggggttaagattattatatatagttagtggttgggagtgggttggggatgtaggatgtttttgtttttttggagtataggggttgggggttaagattattatatatggttagtggttggggatgggttggggatgtgggatatttatgtttttttggagtattggtgtggtgtgagggtgtttgagttaggtaattttaggtttttaagatggggatttgttgtgtttattatttttagtatgttgagtatgttggggttttggttgtgatgggttagtgttttggatttttgtgggttttgttatattgagttttttatagataattgagttttttattaaaagtttgataggtaaggggtttttaggggaattgttattggtttgtgttggagttggttgaggaaggttattaattttttggtgtttttttggttgttattgttgtttatttggggttgttttggggttagttaggtgtggggtgtttgtgagggttttttgttttttttttgattttgtgtttgtggttttgtgtagatattgaggagaaaggtgtttggatgaagttgatagtgattgatatattagggtttggggattatattaataatgagaattggtgaggtttttttagggggaggagtattagtgggggttttagggttttttggattttatttagagttagttttagaggttttttggtttgtgggggtgtagggtttattttttgggatttgatatgttgttaaagttgtatgttttaggggtttgaaaattttggattaaagtagaattatttggggaattttgttgtttttaatttattatttgaggttagtttggggaggttggtttgggaggttgagggtaaggttgtggtatttttgtttagtaagttagattttttagggtatgtattttattggaaggtggggtgttgggttttgagttttgggaatgtatgatttgtttggggagggtattttatgtgtttgttgatttgtttttattttttatgtagttggtagtttattatgaagtttattaatgattagtatgagaaatatttgtaggaggaggttaatattaattgtaagaagtgtattttggatatttgtgtttattgttgtttttattttatttttgttattggttatttgtatgtttttgtagtgttggtgtttttatgttgggtgttttgggttttttttgttttttgggattgtaagatggtgttgtttgttttgttgttgggtgtagaggggttgagttaggggttatggttgttagttatgaagttgggggtgtgttatgtttgtatttttaaagttttatattgatttttatgtaagtgttttgtttagtttttattttttagttgtgttttggggagttgagggttaggtaggttttgggttgttttggagtttggtggtttgtgttttgtttttttaggttaggttttggtaggtggagtgggagtttttagttaagtatttgtagtggtgattgatttttttatttgggttttgttttatgggattttttagagggtttggtgtgtttttagatgggaagtatagagattagtgttggttttttttagggttggatggggttgttgttggtgttggtgagagttttttttttttgttggttttgtttgtatttgatgttgtttttagagattagtaagggtgggaggttgtatgtattttggtaggtggattttttatggttttatggattttttgtttttagttttttgtgtattttttgttagatatttgtggtttattttgagttagggttgggaggaggaggattagaggttagtaggagtggttggtggaggtagttgtgggtggtttgtttgtatgggtgggtggagaaggttttttgtatttgttgttttagatgtatttttttgggtggaggaagtttaggggtttggggaaattatattttgtgggtattaggtgtaggaaggagtttggttggtgggtagtgggttttatttagagtttgtgggaaaatttaagttggagtttttgagtttattttttggtattattttttgtgggttagtaggagttaggggtagggggttagtttgttgtttatgggttttttttgaattgaatatttgtttttttaggtagaatggtttatttgtggttttgtggtagttgttttagttgttttaagttttgttttagttgaggttgatggtaggaggtagaagttttttttgatgttagttgggtaagttgagggtgggtgggtggtttgtggtatttttgttattttttagtattgattttttggttgggattttagttaggtatgttgtttggttttgtttaaggtgtttagttttatggggtaggggtgggttttggttatttttgtttaaatttttgtttggagtgggtttttttttagttatgtgtgtgattgatttatttttattgtgggaaaagtttggttttagaattggggaagatggtgttttagttttagggttttgttagtttttgttatttatagttttttttatattagattttaggtttattggggttaagtaggtaaggggagtagtttgtttggtgtaggggagtagtttgtttggtgtaggggtattgtatattggtgttagtttttattttttttgtttttttttttttagttaaagttttatagtaagatggttgttgagttaatgatagtttttttgtgtggatatgtaggggtgtggttgggattttagaatttatggatgagggtgtttggagttggttttggtttgtttggtttgtgtagtggtgttatttgtgtttgggatatatttgtgttttttttttgttttatatttatagtgtggttgatttggtttggggttttgtttttgttagtagggatttttgtgagttttgagttagtatttgagagtgttgatatttgtttgggggtgggtgtttttttattgttttgtttttttagatgagttttatgtatatttttttgttttagttttaggtttttggatattgagtttatgaaatgtttgagtaaggtggttaatattgtttttgttattgttaaggtggatatatttattttggaggagagggtttattttaaatagtgggtagggttttatttttatttgttttagtttttttgtgtaatttggagatgttgtaggtttggtaggggttattttgtttaaaggagttatattgttagggagattgaattgttggttattttttttagtgggtggttggtttggtggtttttggtttaggtggttgttgggggttgtttttgagatggtttttttagtttttttatattttaaaagtagttttgtgggagtgttaattttttagtagagtttttgaggggggttttggagaagatttggattaggtagatggtgaattttttttttagggagtgaggttgagtaggggttgtgtgatatggtttattttgttttatgttttttttttttttttttgagaaagggtttggtttagttgttaaggttgtaatgtagtggtataattatggtttattgtagtttttattttttaggtttagtttttgagtagttggaattatagatgtatattattatgtttggttaatttttgtatttttagtagagatgaggttttgttatgttgtttaggttggtttttaatttttgggtttaagggatttttttgttttagttttttaaagtgttggggttataggtatgagttattttattttgttttgtttggtttttattagatggaagagaagttgggttaggtgtggtggtttatgtttgtaattttagtattttgggaggttgaggtgggtagattatttgaggttaggagtttgaggttaatatgatgaaattttatttttattaaaaatataaaaatattagttgggtatggtggtgggtgtttgtagttttagttatttgggaggttgaggtaggagaattttttgaatttgggaggtggaggttttagtgagttgagattgagttattgtattttagtttgggtgatagagtgagattttattttaaaaaaaaaaaaaaaaaaaaaagttttaggagggatggtttttgttatttttttttttgttattgtttgaggtttttgttgtgggatagggaggggtatttaagtaagagggtagttttgggtttttttttttgatagggtagtatattagagttatatggggtgttttttaaaatgaaattgaggtgtttgggttgtggtattatatttgttttggtgggtgtgggtggggtttgtaatttattttgttttggggttaggtgttagggatttttttagtatgtgtaggggaagatagtttatataaagtgggtgtgtttgttggaggttatatatgggttgtggtttgtgtttgggtaggtgagtagttgtttattgggatgtttttgttgtatgtatttatgttgggttgttggtagggagttgagaggttattgtaggtggggtttttgttggaattggggattgtgatgagggttttttaggaagggttttaggaggggaggttttggtaattttgagtatttttttggggttgtgatgagtaggagaagagaggtgggaggtgtttaggatgatgattttaagtttttggggagttgtagtgttgtttaggatagtaggtgtatttgtagttgttttttttttttttaggaggtataggagttggaggtgattggtgttatagttttttagagtttgtttttgaatttgagtttggggtagtatatagtgtggaggttatgtggtaaatattagtgggtgggtagagtttgttatagggatgggtttatttttttttttttttattttagattattgtagatttgttgtttaatggtattgatgtgtatttttagaaggaatttgatgaggatttggaggattggttggtgaatgagaagttttgggtgagtggatttattaggatgttgtttttaggggatttttagtttttgttgaagggtgggttgggggtttggaggattttaagttatgaaattatatttttggggttagagggtattgagtttaggtgtttgtatttagtgttgttaggttgaggtttttgtttttgggggattttaggtttagggtagttttttttgggggtttaggggagggaattgtttttttgtatatgtgtaattaatattgtttgtttgttttttaggagatgattttatttgttgtggtgggtagtgattatgagtattaggttaatggtaagaggatttttgggaggaagattaagtggggtattattgaaggtatttgttgtaggtgttggggttttagatagatgggaagatagttttttttgttgatttagagtttgtgggttatgtttgagttagggatttgtggaattttatttattgttttgttttatttagagggaggggtttttttgtttttatttaatttttgggaaagtgagagggtaagtggtttgtgtagatgtttttattttagatttttttttgggtagggaaagatttagggagataggagttgggatgggggttgttaagttttggattttggtgtaggtttttttataggtatttgtgtggttttggataaattgtttaatttttttgggtttagaaaaggggtgggttgtagttttgtgagttagatggatttttggttttttattttgttgaagtttttgggatttttatattttagttttttgagtggttgttgtaattaattagtataaatgaggggatttaaaataatataaatgtatttttatagttttagaggttagaggtttgaaattaggggttgtttttttttgaggttttgaggattagttttatttatgtttttttttttttggtggtgtttggtatttttagttgtattgtaaaggtattatatgttttaatttttgttttattgttatagggtttttttttttgtgtttttgttttgttttttttttttttttttttttttttttttttttgtttgagatggagttttgttttgttatttaggttggagtgtagtgttgtaattttagtttattgtaatttttgttttttgggtttaagtaatttttttgttttagttttttgagtatttgggattatagttatgtattatttatttgatttaatttttgtatttttagtagagataggattttgttatgttggttaggttggttttaaatttttgattttaggtgatttgtttattttgtttggttttttaaagtgttgggattataggaatgagttattgagtttgtttttttttttttttgtttttggataaggatgtttgtttttggatttagggtttattttaagtggatgattttatttggagatttttaatgaatttataaagaaagatgttttttaagtaaggttataattatgggttttaaggtttggattttgattatgtttttgaatggatgggagtttttggggggttatagtttaatttatttttggtggtgatattttgggagggatgggtttgaatgttttttttttttttttttttttgtttttttattttttattagaatggaagaggggaaggtgtagagggaaatgtagtaggaaaagttattttgttttgggagagtatttggttgaaaggtttagtagagtaggaagtataagttttttaattttttagggttttagtttttattatttataaagtgggtgtagtgtgttaagattttagtgagttgagagattgttttaaagattatagagttttttgggaagttgttgttttaaaaaaatggttataatgataattattaggaggtattagatatttttgtgttattggttagatatgggttattttgttttatgtttgaagttttttgtatttattttttttgtagagttgaagaggtgttgtgagtagaaaatttgttaagggatttagaatgggaggtggttttagaatttatagttttagttttgtattagatttttttgagatgggagtttatgtttggaggagggtgtggagaggtatatgggttttttttttgtttgtattttttttttattattatttttgttgggtttattttgtgggagttgtttagttgggtgtagtttgggtgttttttagtatttgtttgtggtgttaggttggtttgtttttttttggtttttttgtttgtagtttttttttttttttttgtttaaagagtttttgttgtttaggaaattttttatgaaaggtaggtttgggagagttagggatggatgggtttgggatgggttggtggttttgttatgggtgtgtttttgttgtattttggtggttaattttgagtattgtaggtggttggtgatagaaattgttaggaaatgtataagagagaggtttttgtatttttttgatttgtgtgttgttgagtattattggttttagttgaggaagagtttggaatttgttaggatagttgtgaggtggtggggtttattttttagtagttttatatgaggattttggaaatgtgtttttagtattgttgggtttttatattaggggttttatgagtttatagttgatttgatatttggattagtaagggttgtgttttgtttttgttttttatttggtgaatagtattttgaggtattttttttatttttagaaattattttaagtattgttaatagaaatgtggggtgtaattgattatgttatgaatttatttaatttttatgtttttgagaggtgggtgatgttattatttatattttatggatgaggaaattgagggaatgagagtaatttgtttgagttagggagtggtgattatatattttaattttagtttgagagttttattttttttgttggtttttgttgtttgttagtgttagatgagagtgttgttggttagtttgtaggaggttttagtgtggatattgttttatatagggttgtggtaggagggtttaggtaaaggtaattggtatagtattgagagtatttgagggttgggtaaggtggaggttttggttttgtttgttggtttattaagtaaaaattagatatttttaatttggggaaaagttatgtggttttgtgatggggtagtttggagttaggtgtatgggttttgtattttgttttagttttatgtattgtggagttgagatagatatagtttttgtgttttttatgttttattttttttttttttttttttttttttttttttttttttttttgagatgaagttttatttttttgtttaggttggagtgttgtggtgtgattttggtttattataatttttattttttgggttttagtgatttttttgttttagttttttgagtagttgggattataggtgtttggtattaggtttggttaatttttgtatttttaatagagatgagattttattatgttggttaggttggttttgaatttttgattttgtgatttatttattttagttttttaaagtgttgggattgtagatgtgagttgtggtgtttagtgtttatgttttatttttgtaagataatggggataataaaggaattataagagatatttgtaggtgtgtgaagatgaagtttattatatgggagggtattgggtgtttttatttgttttttttgtttggttttttatttttagtgatgttgtttattgttttttttgttaaaaggttttttgttatataatagttatatatgttaggtattgtgtgtttatataggagttatgaagtatagtaataaaatgattattttgagatggttattagtttgagtttgagggtatttgtgggtgtttgtggttttttgtttagtttttttgagaagtggttattgttttgagtttgggtttgtatgtattgtgtgaagtgtatatgtttttgagtaatgtttagtattgttgatttttgagtttgtgaatggttgtttatagtatgtagtttttgtgtgtgtttttgtgtgtgtgtgttttgagtgtatataaggtggatggggttgtgggggtaatattttgtgggttataggttttttttaaaattttagttttgatttttgttttattttatttttagtagtttagttttttgtttgtttttaggtttttgttgggatgttttgttttttttggttattttagtggtgtgggggtttattgttttggtttttttattgtggtttttttttatgtttttatttggtttggttattgtgttattttttattagttaggaattttttggagagtaggagttgagttgtttaggagtaggagttggtgttggttattttagtattttttagattgagggtagtgttaggtgttttatatttagttgtagagtaggtggtttttttgtttttttgtttatggggttgtttttagattttgtttttggtattagtatttttgggtagggggagagaggtggggtttgggtagagtttttttattgggatattaaagttttttttgtttttttttttagttgaaaatattatatattgtgagtttgtttatttgtgggatttttttattaggtgagagatagggtgtttgggtggggttgatggttttatttttaagagggttttatagtgggtgggggtagtgggtgtggggttgaagttttgggtagagtgggtgttttttgttatttgtttgttttgtttttgggaagattttggaagtttattttttgaaaaagaaaatttattgggaaatgaagtaggtagtgaagattttttttaatttttgtgaagttggttggatgggaaggttgagttttgatttattgtggtttggtttgttagagttgtttggtggttattaagggtttagtgaggttttatgtgtaggttttgttggtagtgtggggtgtttttagttttgattttattggtttttgatttttattttttttatttggttgaggtttttttttgttttttttgagtttaggtaaggaggggaagttttgatggagagggtgttgggtgggtggtttttggagtgtgggttttggtttgggtaggtttttttttagtaagtagttggtatggatgatgggaatgttattaagaggaggggtttttaggttggtgggggtaggggtggggggattttgggagttgttttgttattgtggggatattgggttttttaatttttttttagattattttttttgagttgtagaggaatgaaaatttgagtttaggattttttttttttggggataagggtaatttagttttttgttttaggttatttgtttgttataggttatagttttggaggttggtggttatttattgtttttattttgttagtattttggatattggtttggagtaataatgttttagttttgtttttttgagtttatgtattgtttttgggttttggatttagggttatagggtggatttagagggagatatatgtattggaatatgtgtgttttgattgagtttgggtttattagggggattgattttttttttaaaatgtgtattagatttggtttaatatggtgggtttgggggattttatggggagttaagtagttgggatggggagtgggggtgggggtaggtgggtttgagtttgaggtaggttgagtagggtttttgttttgttgtttttattttgttgtgtttattttattgatttgtttgttttttatttttataggatgtatatgtagaatattaaggatattattagtagtatttattttgaggtgtattgtgtgaagtgttttaatgagggtagtagtgttatggttaatggtatggaggagaaggagttagaagttttggagatgtagatgttattttgtttatttttgggattttgtttttaagttatttttgtttttttttaggtttttttattattttattttattttatatgattttttttatttgttattgttttttatttttttgatatgttgttaggaaataagggaaggggtttttttttgagtgagttagtgatgaggttgtggtttttttgaggttgtggggaggttgtattggagttataggtaggggtgagagtatttattgaattgatatgattttttgtttttaggtttggttttttgagggtttagaagagtagttttggtgtgtagattatttgtttgtgtggggtttttagtgttggaggttttggggtgggggttaggttttgtatttgtagaggagtttagtgggttgtatgtttttttttatttttattggttttgttttttggagtgtgttagagtttaggggagaatgtagtttattaggagtatttggattttttgtttgttatatggtgtggttattatttagtttttatttttgttttgtttttaagggtagaaaattttagggttttttgttattgattgtttagttattttaagttttttggtagttgttttttttggagtagaaagtgtttttattttagttatttgtagattgtttggttagatgtggggataggttggaatgagggaggtgtttttatttttttgttattttttttttatgttatttttgtttttattgggttgtaggtgttgttgatgtgttgggatttgattgaggataaaaaggaaggagagatgatttttatttttttattttttagttttgaaaaggtttaagtaagtgagtttggtggaggagttgagggagggagttatggaaggtgttagaaggaaggttggtgggggtatgtgtgggttgtggtttgggttggttagagtggtgtgagttgtttggtgtttgttttgtttaagtgattagggaagtgtgtgtgtgtttatgtgtatgtgtgtttgtttgtttgtttagtgtttgggtttggtttaagattgggttgtagttatattaatgtttagttagttatttttgttatttattttttttggtttaggttttgttgattttttgagttggggaggtgggaggttaggtgagtttgattttgttgatttatttgtgtttgggtttttttttttagagtttatggtaatgaatttttagaaaggagagaatgggtgttaggggtgtatagtttatagttgaagagtaaggttttgtggtagtatggtttggttttttattttttgtttttatgaggggatttatgggggttgtttttgtagggtatagatgattaaagtttttttttgttttttgttatttgttttgtttttggggagaaagaggggtttgatgagattttatttaggtgtatatattattaggtgtatttgtaggtattgggttggttgtttgtagttaggagaaggttagtgagaaggagtgtatgagtgtgagtgtgtgtgtatggaagttggggtattgggtgtttgattttttttttatttaagagaggaaggattttttattatttttattggtgagatagtttattttgttaatttgttatgtttttgttaaaattaagattttgaaggaaatgagtggttagtgttagggtttaggttatgtggtttgtttagttttaatgttatttggtggtggggtggggtgggggtgggtagtagtattttagttttgagatgttttattttttttttttgtaattagattttgaaaaattgtttgttttattaggttttgttttttaatggttttttgttatgtgttttttgagaaatttgtttttttgtataaatgataaagtgttgaaaatgtattttttgaaataaatgttttaaatgtagaaattta

SEQ ID NO: 10 - DNA, 221909 bp, Artificial Sequence
  chemically treated genomic DNA (Homo sapiens)
tgggtttttgtatttgaaatatttattttaggaaatatatttttaatattttgttatttatataaaaagataaattttttgggaggtatgtagtaaaaggttattgaggaatagagtttgatgaaatgaataattttttaaagtttggttatagagaaggaaagtgaagtattttaaggttgggatgttgttgtttatttttattttattttgttattaagtgatattgaggttgggtaggttatatggtttgggttttggtgttggttatttattttttttaaaattttggttttggtaaaaatatggtaagttggtaaagtaaattgttttattagtgggggtggtgaggggtttttttttttttgggtggggagggagttagatgtttagtgttttaatttttatgtatatatatttatatttatatatttttttttgttgatttttttttggttgtaagtagttagtttggtgtttgtagatgtatttggtgatgtgtgtatttgagtggagttttattaggtttttttttttttttaggagtaagataggtaataggaagtaggaagggattttggttatttgtgttttgtaaagatagtttttatgggtttttttgtggggatagagggtgaggggttgggttgtgttgttatgaaattttgttttttagttgtggattgtgtatttttgatgtttgtttttttttttttaggggtttgttattatgggttttgaggggaggggtttaggtatgggtagattaatagagttaggtttgtttggttttttatttttttagtttagagagttagtaaggtttgggttaggaagggtgagtggtaggggtggttggttgggtattaatgtaattatagtttagttttgggttaaatttagatattagatagatagatggatatgtatatatatggatatatatatatttttttggttatttgggtagggtaggtgttgggtagtttatgttattttgattagtttaagttatggtttatatgtgtttttgttaattttttttttggtattttttatggtttttttttttagtttttttattagatttatttgtttagatttttttaaaattgggggatgagggggtaggggttattttttttttttttttatttttaattagattttagtgtattagtagtatttgtagtttggtgggggtgggggtggtgtgagagggggatggtagggagatgaagatgttttttttattttagtttgtttttgtatttggttaagtagtttgtggatggttgagataaaggtattttttgttttaggaggggtagttgttagggggtttggagtggttgggtagttggtggtaggggattttggagttttttatttttaggagtagggtaggggtaggggttgagtgatggttatattatgtggtgggtagggggtttaggtgtttttggtgggttgtatttttttttgggttttgatatattttaggggatagggttgatggggatggaggggagtgtgtagtttattgggtttttttgtaagtgtgaggtttggtttttattttaaggtttttggtattgagaattttatatagatggatgatttgtatattgaagttgtttttttgagtttttggggagttaggtttggggatagagggttatgttaatttagtgggtgtttttatttttgtttgtggttttagtgtagtttttttataattttggggaggttgtggttttattattgatttatttggagggaggtttttttttttgttttttggtagtatgttgaaggggtggggaatgatgataaatggagaaaattatataaaataaaatggggtggtgggagggtttggggggggatggaaatgatttgggggtaggattttgggggtgggtagggtggtgtttatatttttggggtttttggtttttttttttttatgttgttggttatggtgttgttgtttttgttgaggtgttttatatggtatgttttgaagtggatgttgttggtgatgtttttgatgttttgtatgtgtgttttgtgggggtggggggtgggtgggttagtgaggtgggtgtagtggggtgggggtagtggggtaggggttttgtttggtttgttttggatttaggtttgtttgtttttatttttattttttattttgattgtttggttttttatggggttttttaggtttattatgttggattagatttggtatatgttttgggggaagggttagtttttttggtaagtttagatttggttagaatatatatattttagtgtatgtgtttttttttgggtttattttatggttttgggtttagggtttagggatagtgtatagatttagagggatagggttggagtattgttgttttaggttggtgtttagggtgttggtagggtggaagtagtgggtgattattggtttttaggattatggtttgtggtaggtaggtggtttggggtaaagggttgggttgtttttgtttttaggaaaaaaaagttttgggtttggatttttatttttttgtagtttaggaggaataatttggagggaggttggaaagtttagtatttttataatggtagaatggtttttggaatttttttatttttgtttttgttaatttggaggtttttttttttgataatatttttattatttatgttagttgtttgttgaggaagaatttgtttaggttagggtttatattttagggattatttatttagtattttttttattagggttttttttttttgtttggatttaagggaaataaggagaagttttagttaggtgaaaggggtaggggttagaggttagtgggattggagttggagatgttttatgttgttggtagggtttgtatatgaggttttattgggtttttagtggttattgggtagttttaatgggttagattatagtggattaaagtttagtttttttatttagttaattttgtaggggttgaaaaggatttttattgtttgttttattttttagtgggtttttttttttagaagatgggtttttaagatttttttgagggtagggtaggtaggtggtagggggtatttattttgtttagggttttggttttatatttattgtttttatttgttgtagggtttttttaggggtgaagttgttagttttatttaagtattttgttttttatttgatgagaaggttttgtaggtaggtaaatttatagtgtgtggtgtttttaattaggagaggagataggaggggttttaatgttttagtggagaaattttgtttggattttatttttttttttttgtttagaaatgttggtgttaaaagtagagtttgagggtagttttatgggtaggagggtaggggaattatttgttttgtagttgagtataggatatttggtattgtttttagtttgggggatattggagtgattagtattagtttttgtttttggatagtttagtttttgttttttagaaagtttttggttaatgggagatggtatagtgattaggttaaataggagtatggaaggaagttatagtggagaagttagggtagtgggtttttgtattattggggtgattagggagagtaggatgttttagtaggggtttgaagataggtagggggttgggttgttgggaatgggatgaagtaggaattggagttgggattttaaagaaaatttgtggtttatagggtgttatttttatggttttatttattttgtgtgtgtttagagtatatatatatagggatatatataggggttatgtattgtggatgattatttataagtttaagaattagtaatgttaaatattgtttagggatatgtgtattttatataatatatataagtttaagtttgggatagtggttattttttagggagattgggtaggagattatgggtatttataagtgtttttgggtttgagttggtggttattttagagtggttattttattgttgtgttttgtaatttttatatgaatatgtggtgtttggtatgtgtaattgttatataatagaaggttttttaataaggagggtagtgaatggtattattggaggtggggagttgggtagggaaggtaaataaagatatttggtgtttttttatgtgatgaattttgtttttatatatttgtaagtgttttttgtgatttttttgttatttttattattttatgaaaatggggtgtagatgttgggtattatggtttatgtttgtaattttagtattttgggaggttgaggtgggtggattatgaggttaggagtttgagattagtttggttaatatgatgaaattttgtttttgttaaaaatataaaaattagttaggtttggtattaggtgtttgtaattttagttatttaggaggttgaggtaggagaattattggaatttaggaggtggaggttgtggtgagttaagattatgttatggtattttagtttgggtaaaagagtgaaattttgttttaaaaaaaaaaaaaaagaaaaagaaaaagaaaagaaaagaaaatgaggtatagagaatgtaagaattgtgtttgttttagttttatagtgtataaggttggagtgggatgtagaatttatatatttggttttaggttgttttattgtagagttatatggtttttttttaagttaaaaatgtttagtttttatttggtaggttagtaggtagggttggggtttttattttgtttagtttttaagtgtttttagtgttatgttggttgtttttgtttaggtttttttgttatggttttgtgtagggtggtgtttatattagaattttttgtagattgattagtagtatttttatttaatattgatgggtagtgagagttggtaggaagaatggggtttttaggttggagttggagtgtgtgattgttattttttggtttgggtaagttatttttatttttttagtttttttatttataaaatgtggataataatgttatttgttttttagggatatgaggattaaatgagtttatggtgtgattaattatattttatatttttattgataatatttggggtggtttttaaggatgggaaagatattttaagatgttgtttattaagtgggaggtaagaataaggtatagtttttattagtttgggtgttaggttagttatgaatttatggggtttttgatataaaaatttagtagtgttgaaggtatatttttagggtttttatataagattgttggaaagtgggttttattattttataattgttttgataggttttagatttttttttagttggagttagtggtgtttaataatgtataggttagagaggtgtggggattttttttttgtgtattttttgatagtttttgttattggttatttgtggtatttaaggttggttattagggtgtagtagaggtatgtttatagtaaagttgttggtttgttttaggtttatttatttttaatttttttaaatttgttttttataaaaagttttttaaatagtaagaattttttgggtagagaggaagagaggaattgtaggtagaggggttaaggggaggtaagttagtttgatattataggtggatattggaaaatatttaggttgtatttagttgggtagtttttgtagggtgggtttggtaggggtggtggtaggggaggagtgtagataggggaaaggtttgtgtgtttttttatatttttttttaggtatgaatttttattttgagggagtttggtgtagggttggagttgtagattttagagttgttttttgttttgggttttttggtaggttttttgtttatagtatttttttaattttgtaaggagggtgggtgtggggagttttggatatgaaatgagataatttatgtttagttagtggtataggagtgtttgatgttttttggtaattgttattatgattatttttttagagtaatagttttttaaaaagttttgtggtttttgggatagttttttaatttattaaaattttggtatattgtatttattttgtggatgatgaaaattgaggttttggaagattaagagatttgtgttttttgttttattgggttttttagttaagtgtttttttagaataaagtggttttttttgttgtatttttttttgtattttttttttttttattttaatgagaaatgaagggatagagagaggaaggggaaggaaatgtttgggtttattttttttggggtgttattgttaggagtgggttgaattgtggttttttaggggtttttatttatttaaagatatggttaaggtttaggttttggaatttatgattgtgattttatttggaaaatgtttttttttatagatttattaaggatttttaaatgggattatttatttagggtaggttttaagtttaaagataggtatttttgtttaaagataagaaggaaagagggtaggtttggtggtttatttttgtaattttagtattttgggaggttaagtaaggtgggtagattatttgaggttaggagtttaagattagtttggttaatatggtgaaattttgtttttattaaaaatataaaaattaagttaggtgggtggtatgtgattgtaattttagatatttgggaggttgaggtaggagaattatttgaatttaggaggtagaggttgtagtgagttgagattgtaatattgtattttagtttgggtgatagaatgagattttgttttaaataaaaaaaaaaaaaaaaaaaaaggaagaggagggatgggatagagatatagggaagaaggttttgtgataatggggtagagattagagtatgtgatgtttttataatataattaggaatgttaggtgttattagaaggaggaaggtatggatgaggttggtttttagggttttagaaggaaatagtttttgattttggatttttggtttttggaattgtgaaaatatgtttgtgttgttttaagtttttttgtttgtgttaattggttataatagttatttaagagattaaggtgtgagggttttaggaattttagtagggtaaggggttgagggtttatttggtttatagagttatagtttattttttttttaggtttagagaggttgggtgatttgtttagggttatataggtgtttatgaaagagtttgtattaggatttagaatttggtggtttttattttagtttttgtttttttgaatttttttttgtttggggggaggtttggggtggaggtatttgtataggttatttgtttttttatttttttaagggttgaatggggataaggagatttttttttttgggtggggtaaggtagtggatgaggttttatgagtttttggtttaggtgtggtttataggttttgggttagtagaagagattgtttttttatttgtttggagttttggtgtttgtggtgagtatttttgatggtattttatttggttttttttttaaggatttttttgttgttgatttggtatttgtggttattgtttattatagtaaatgggattattttttggggaatgggtagatggtattggttatatatgtgtgggaaggtaatttttttttttgggtttttgggaggagttgttttgagtttggggttttttaaaaatgagagttttagtttgatagtattgggtatagatatttgggtttagtgttttttggttttaagaatataattttatggtttaaggttttttaaatttttaatttattttttagtaggaattgggggttttttgggaataatattttagtggatttatttatttggaattttttgtttattagttggttttttgagtttttattaaattttttttgggggtatatgttgatgttgttggatagtaggtttgtggtgatttgggataaggagggagagagatgggtttatttttgtggtaagttttatttatttattggtgtttgttatatgatttttatattgtgtgttgttttaggtttgggtttaagggtaggttttggggggttgtgatattaattatttttaatttttgtgttttttggagggaagaggggtagttgtaggtgtatttgttgttttgagtgatgttgtaattttttaggggtttaaggttattgttttgagtattttttatttttttttttttgtttattatagttttaagaaagtatttagggttattgagatttttttttttgaaattttttttaaaaaatttttgttatagtttttagttttagtaggggttttgtttgtagtaattttttagttttttgttagtagtttgatatgggtatgtgtaatagaaatattttagtgagtggttgtttgtttgtttaggtatagattatagtttgtgtgtagtttttggtagatatatttattttgtgtggattgtttttttttgtatatgttgggaaggtttttgatatttggttttaggatggagtaggttataggttttatttatatttattgaggtagatgtggtgttgtagtttaggtattttggttttattttgaaaggtattttatgtggttttgatgtgttgttttgttaggaggaagagtttagggttgtttttttgtttggatgtttttttttattttatagtaggggttttagatggtggtggagaagaaggtggtagagattattttttttgaaatttttttttttttttttttttttgagatggagttttgttttgttatttaggttggagtgtagtggtttaattttggtttattgaagtttttgttttttgggtttaagagatttttttgttttagttttttaagtagttgggattataggtgtttgttattatgtttgattaatatttttgtatttttagtagagatggggttttattatgttggttttaaatttttgattttaagtgatttgtttgttttggttttttaaagtgttgggattataggtgtgagttattatatttggtttagttttttttttatttaataaaaattaggtagggtgaggtgaggtggtttatgtttgtaattttagtattttgggaggttgaggtaggaggattttttgagtttaagggttagagattagtttgggtaatatggtaaaattttgtttttattaaaaatataaaaattagttagatatggtggtgtgtgtttgtaattttagttatttggggattgagtttgggaggtggaggttgtagtgagttatgattgtgttattatattgtaattttggtaattgagttagatttttttttaaaaaaaaaaagggggggtataaaataaggtgggttatgttgtatggtttttgtttggttttattttttggaagagagatttattatttgtttggtttaggttttttttaaaattttttttagagattttgttggagaattggtatttttataaagttgtttttgagatatgggggagttggagaggttattttagggatggtttttagtagttatttgggttagggattattaggttagttatttgttggggagagtgattagtggtttggtttttttgatagtgtgatttttttagatggggtggtttttgttaggtttgtagtgtttttaggttgtatagaagggttggggtaagtagagatggaattttatttgttgtttgaagtggatttttttttttagggtgagtgtgtttgttttggtgatgatagggatgatgttgattattttgtttaggtgttttataaatttgatgtttaggggtttgaggttgaagtagagggatgtgtgtgaggtttatttgggggagtggggtagtgggggggtatttatttttaagtaggtgttgatatttttaggtgttggtttggggtttatgggggtttttgttggtaaggatagggttttgggttgagttggttatgttgtgagtgtggggtagaggaaggatatgggtgtgttttagatataggtgatattattgtataggttaggtgggttagggttagttttaagtatttttgtttatgagttttggggttttaattatatttttatatgtttatatagaagggttgttgttggtttagtagttgttttgttgtggggttttggttgggaggggagaggtaagagaaatagaagttagtattagtgtgtggtgtttttgtattaggtgggttgtttttttgtattaggtgggttgttttttttgtttgtttggttttagtgagtttggggtttgatgtggggaaagttgtgggtggtaggggttggtagggttttggaattggggtattattttttttagttttggagttgagttttttttatagtgagaataaattggttatatatatggttggggagaagtttgttttgggtagaagtttaagtagagatggttaaggtttgtttttgttttatgggattggatgttttgggtgggattaggtaatatgtttagttggagttttagttaaagggttagtgttggggagtggtagaagtgttatagattgtttgtttgtttttggtttgtttagttggtattaggagaggtttttgttttttgttattagttttagttgaggtaaagtttggagtagttggaatagttgttataggattgtaggtgagttgttttgtttgggagggtagatgtttagtttaggagaggtttatggatagtgggttggttttttgtttttgatttttgttggtttatagaggatgatgttagagggtgggtttgaaaattttggtttgggtttttttatagattttgggtgaggtttgttgtttattagttaggtttttttttgtatttggtgtttatagagtatggtttttttaaatttttgggttttttttgtttagggaagtatatttgggatagtaggtgtgaaggattttttttatttatttatgtagataagttatttatggttgtttttattagttatttttgttggtttttggtttttttttttttagttttggtttagggtgagttataggtgtttggtagggggtgtatagggagttgaggatagagggtttgtgaggttatgaagagtttatttgttagggtatatgtagttttttgtttttgttgatttttaggggtgatgttaggtgtggatagagttggtgggaggaaagggtttttattaatattaatagtagttttgtttagttttggaaggggttagtattgatttttgtgttttttgtttaagaatgtattaaattttttaaggggttttatgaggtagggtttggatgagaaggttagttattgttatgggtgtttggttgggggtttttattttatttgttagagtttggtttgagaaggtaggatatagattattaggttttagaatagtttagggtttgtttgatttttagttttttaagatgtagttgaaggatgggggttgggtaggatatttgtataggggttagtgtgaggttttggaggtgtagatatggtatatttttaattttatagttggtggttatggtttttgatttagtttttttgtatttagtagtagggtagatagtattgttttgtagttttaggggatagagggaatttagggtatttggtatgaggatgttgatattgtagggatgtatgagtggttggtggtggggatgaagtagaggtagtagtggatgtgggtgtttgggatgtgttttttgtggttgatgttgatttttttttgtaggtattttttgtattggttattgatgaattttatgatgggttgttagttgtgtgggggatggggatgagttagtaggtatatgagatgttttttttaagtaggttgtgtatttttaggatttagagtttaatattttattttttaatgaaatgtatgttttgggaggtttggtttgttgagtggagatgttatagttttatttttggttttttaaattagtttttttgggttggttttaggtgatgagttggggatagtaagattttttaggtaattttgttttggtttagaatttttaggtttttgagatgtgtggttttggtagtatgttaggttttaggaggtgggttttgtatttttgtgggttgggaaatttttagggttgattttgggtggggtttagggagttttgaagtttttgttagtgtttttttttttggaggggttttattagtttttgttgttgatgtggtttttgaattttggtgtgttaattattgttagttttatttggatgtttttttttttaatatttgtatagagttatggatgtagagttagaggggagatggaagatttttatagatattttatatttgattgattttggggtaattttaggtaggtagtgatgataattaaggagatattgggaaattaatggttttttttagttaattttggtataggttggtgatggtttttttgggagttttttgtttgttagatttttggtggaaaatttagttgtttgtggggagtttagtgtgatggggtttataggggtttgggatattgatttattatagttagagttttaatatgtttaatatgttggggatggtgggtatagtgagtttttgttttggggatttgggattgtttgatttgggtatttttatattgtattagtgttttaggaaggtatgggtattttatatttttagtttatttttagttattgattgtgtgtgatggttttgatttttaatttttgtgttttaggaaggtaggggtgttttgtatttttagtttatttttggttattgattgtgtgtgatggttttgattttttattttgtgttttaggaaggtagaggagttttgtatttttagtttgtttttggttattgattgtgtgtgatggttttgatttttaatttttgtgttttaggaaggtaggggtgttttgtatttttagtttatttttggttattgattgtgtgtgatggatttgattttgatggttttggggatgtgtttttttgaggtgggttgtattgatttttggttgattttggatttgaagagggtgttgattaaggtggatttatttaagttgttttgttttggggagaggatgggaggttggttaggggtttttttggagagattagtagggtttgtatatggggttttttttatttaggtatgaggttttttagtttgagatttagtagtgtttgggttattttttggtaatatttttgttaagtagtttttgaggattttatttttgagttgggtgtttagtgattgtgtaaatttatatagttgggttttgatgttagtataatttaggttatagtttttttttgagaggtgagttgggtttgggagagttggtattttttgtgttttttgtgttttttggataggaggttttttggtggtttagattttggataggatagaggttgggttggtggaggagtttagggttgtttagggtgtattaggtggttgggatttttgtagtttattagggtggttgtaattaaagtttaggtgtttaaattgtttttttttgattggttagggtttgggtaagttatttgattttattgtgttttagttttttgatttgtaaaatgggataaatagttttttttttgtggagttggtgtgagtattaggtaggtttatgtatgttttatggggtttgtggggttatgtgttagggggtgttggtttgtagggtggtgttatttgagggatagtgattgtgtgtgtagatagttagtttataggtgattgagataaatgaggatgaggaagtagtatttatatgtaatataatatatataatttatatatattttatatatatattttataatatatatattttatatgtataatttataatatatatataatttattttaaatatattttttatatatattttatatataatttttataatatatataaataaattatatataatatgtgtgtgtgtgtgtgtatatatatatatatatatatatatatatatatatttttttagatttggagttttattgttttattttgtatagagttgttttgggttatgttagtaatatattaaaaaaaatattttaggttaggtgtggtggtttatgtttgtagttttagtattttgggaggttgaggtaggaggattgtttgagtttaggagtttaagattagtttgggtaatatagagagattttgtttttatattaaaatgtaaatattggttaggtgtagtggtgagtatttatagttttagttatgtaggaggttgaagtaggagaattgtttaagtttaggagtgtgaggttgtagtgagttaggattattgttattttagagtgatagagattttgttttttaaaaaaataaaaattggttaggtgagatggtttatgtttgtaattttagtattttgggaggttgaggagggtggattatttgaggttaggagtttgagattagtttggttaatatggtgaaattttgtttttattaaaaaatataaaaattagttaggtatggtggtatatgtttgaggtatgagaattatttgaatttaggatgtggaggttgtagtgagttaagattatgttattgtattttagtttgggtaataatgagattttgttttaaaaaaatataatataaaaaatattttaaattatattgatgttttgattttgataatatttttttaggaaaagtgtgggtttttgggaggatagaggttggtgttgggaatttttggtttgaattgtttagtagtttaaggatggatattttttgtttatttttttttgtttattaggtttgtgttttggttaattttaggttaggagttatgttaatgttttagttatgatattttagatttaggagatgttaattgggatattgtaaggtgtatttttttattattgttatttttattattattattattattattattatttttattattattattatttttattagtattattattataatattattattgttattattattattttattatttttgttattattattatttttgttatttttattattattattattgttattataattattagtattagtattattattaattatattattattattattttattattattattattaatattattattatttttattattattattattattattaatattattatttttattaatattattattatttatattattattataattattattattataattattattattattttttttattattattataattattattattattattattattataattattattatttatattattattattatttttattataattattattattatttatattattattattatttatattattataattattattattatttttttattattattattattattattattataattattattattattttttttattattattataattattattattattttttttattattattataattattattattattttttttattattataattattagtattatttttattattattattataattattattattattattattattattattattattataattataattattataattattattatttatattattattattataattattattgttattattattataattattattattatttatattattattattataattattattattatttatattattattattataattattattattattattataattattattattatttatattattattattataattattattattatttatattattattattataattattattattatttttattataattattattattatttttattattattattattattattattataattattattattataattattattattataattattattattattattattattattattattattataattattattattattattattataattattattattattattattattattattattattataattattattattattattattattattattattatttatattattattattattttattattgttattattattattattattatttttattatttttatgattattattattattatttttattattattattattattattataattattattatttatattattattattattttattattattattattattattattattatttttattatttttattagtattattattttattattattattgttattattatttttattatttttattattataattattattattattgttgtaaatttttgaataattataatttgttggggattttgtttggggtttagtttgtttgattttattttatgggatgattttattttatggatgaggaagttaaggtttatagaggaggagtttaggggaagatatataagttttattttgttgagttaggataaagttgggattttttttggggtttgtggatttttaaataggtgtttttttattttgtttgtatttttgtaggtgggtatagttgttatgggagggaggagggaggagagtagagttgttttatgttttgttttttatttggtatttttgggagggagtgattttgtggggaattaggattattgttttttttagggttgaaagggtgaagaggtttagataggtgaagtggttttttgtgtattatttttagagggtaaggttgttatagtggtagttatggaaggtgagggttgttgggttgtttttttttttttttggggttaaagttttggaagaaggtttgtgttatggttgggatgtagaggtttttaggttttttttattttgtttttggttagggagtagggtagtttttttgtagtttatagagatgagttttagtttggttattgtttttgggttttttttttttttttttttttagttatttttttgggaggtagttttgaatttttagggtataagtatgttttttataataggtagaatagggtgggggttgtaggaggggattttatatttttgtttttttttgaagtaggttgttagtttttaggtagttgtgagtatagtagggttatgagtagttgggttttatgaggttataggaagtagagaggatattaagattttaggggagttagggtttagattagtgtagaagaggaaagaaaggtgttgggttggtaggtgtgggtttgtgtttatagagttgggtaggaaggatgtgtatggttggtaaaggttagagaaataggtttggtttgagaggtgtttagatattttgtagaaattttgtaagtttatttttgtttagggtgtgatttggtgggggtatttttttagatttttttttggattttgtggagtgggtagaatatagttttgggagttaaaatggtggttgtggttttttgttttgtgagttaaggaattttggtagttttttttgagttttgtttttgtttggaaaatgggatgttttttttatagggtttttgtgaggtttgaatgggatttggggggttttggaaataataggtggtttattgtagattttagtttggtttttttattttgtttaggttgtgttgattgatgattttttgtggtgatttttagttttttggggttattagggggtgtggaagttatgaggttttaattttagggtagagttgaagttgagttgttgggaagtttttggttggggtgtggtggggtgtggtggggagtttggagggttaggttggagtaatagtgaggggatagttgttatagaattttttgtataagttgatgttattgtttagaggtagtgattatttattaggatttgttttaggttggtttgggttttttaaagttattttaggggttttggatgtgtaggataggtttttttgaggagttgttggaggttgtgggttttttttaggtgtatgtatgtatatgtaatgttattggtaatttgtttttgaggttagggttgttgttttattttatagaagggaagattaagtttaaaggtttgtgggttgttttgggggttgaggttggtttttggtattggttgagtggtatgtaaggtgaggatttattgattattatgatgttgaatttgaagttttgttttatggttttttggtgtatttgttttaggatggagttaatttttatgtagttgaagtttattggggtttttttgttttgtgatgtaggtgtttgtttgagtttggtatttttgggggtgttggttatgttgttaatgtagttgggagttgttttagtggttggggaaggaatagtagaggagttagagtggaataggggtttatatataggtgtttgttaggtggttgttatatttatttttggatggggaaattgaggtattgaggtttagaaaggttaagtgatttgtttaggtgatttttgagaatttttttgggtggatgtttttggttgtggtgttttttaaaaagttgttattttgtagttatgttgtttttttagtaaagttttatttttagatttttaaggttaggtttttttatttttttttttaggagttgtgttaagttgggggttttttgtgttttaaggtagggttgattttgaatttttgtttttgtattttggagggttgtttagataagggtggagggtgttttttttttttggttttttatattgttttgggttatttaggtggatttggtttttttttttatttttatttagataagttgtattgtttgttgttatttaaaggttttagaagttgatttatgagttaagatataggagggatggttttgtaagaaatggggatagaattagtgtgtgtttttgttttttatatttttatggatggttttgtaagaaagggggatagaattagtgttggtttttatggagttgtgtgtttaattttatagaatgagttagtagttttgggagaaggaaaagtgttgggtgtagggtgggtgtttggatgtagagttgtttttgggtttatggaggaggggggtttttgtattatatttgtttttttttggattgatttaggtggttgttttgtgtgtttggttagtgtttatgggttgtatatttataggttaagattaagttttatttttgggtatgtggggtatgtggagttgaattttttgaaattattaaagttttttttgtttgtaggtttttttgatggttttgtttttggttgttgttaagatattatatatgggttagaggtttggggttgggggtggatgtttggaagatgtttgttgaggatttaggtgtttttatatagtggggttttaggggtatttaggatggggttggtttttattagggttggttggtatatgggttaggttttagtatattttagatttgttatatttattggtgtatgtgtatgtaggtgtagataatttgttggttatagaggtggtgtttttgttagtttttataggttggagttgtttttggtggtttttagtttttatgtaggttgggtggttgttgttttgtgtttttgtttttgtttgggtttatttaggttttgttttgtttgtggggagatttttgttttattttgttttttagggaggatttggttttaggtattttgtgttaagatagggattatatggtatgtttttaggtagggttttttttgttagttttttgggaggggagtggtttttttttgggattggtgggtatttagtaggggtagttataggggagtggagttggtgtgggagttagggttatagtatgggaggttgtagggggtttattttttgtgataggtaagtgagtagtttttttagataggaggtagtttttttggtttatgtttattttttattttgtttagaaggtgggaggtaggtttttaggttaggaggggtagtgggagattttagtttaattgtttttttatttgtggggtaagaattgaatttaggaaatgtttattgagttttttggttgtagtttgtatttttagttgatttaagttattttttttggtttattttattggagtggttagagggtgttggagggaggttttttaggtttgaggtattagaggtgagagaggaaaagattttggaagttagaaattgggggttggtttatttttataggtatttttttgtttttttagtttttatagggtataggaatttttattttatggaattgggggaataaaggaataatataattttttgttgggaaatgttaagggggggtttatatatttttattgttgagagtaatatttataggtggatttggaggttagggtttttttttttgtgtttttatgtggtttttatttaggttatgtagtttggaagtttttagggttttgtttttgtttttgttttttttttagaaatatttttttttgggtttttaggatttttaaataaataaagatatagttttgtatttggttatggattatgtggttttggggttgttttttgaagttagatatggggttttgttttgtggggtagtagtttagtttttatttatgtgattgaaaattgtttttatttgtttgtgggtttgagagttattttgtttgggattgggattagtttttatttgtttttatttttttttagtattttttaattttttttagtaggatttggggggaggtgttgttttttgaattttttttttttgtttttaatgtttttggagtttagagtgagggaggggttggtttagttgtagttgggtttttttataggtattagtatttattgtagaaatttaaattaaattaaatattttgtttattaggggttttgtttgagaaataataatataatgtagttgagttttatttttgttattgatgtagggtagtggtttgttttttgtataggtgagagttatttttgtaattttttttttgagaggtggttttgtaggttttggttggtttgtaggtaggtatgtatgtagagagtaatgtaagagtttgttttgtttttttatttggttaggtgagttttggggtttgtttttaggatttttaagtgggaaaagtagagatttttatatttagagatatttttattttggttttaggatattatggtgtttagatagttggaaataatggtaaagattatttattttattgtttgtgattatgatattgtttgaggtttgtgttgtttagtgtggtagttattggttatgtgatttttttttttaattgttataatgtttgttatggttattattttgaagtgtgtagtttagtggtgttaagtatatttgtattgttgtgtaataaatttttagaatttttttattttgtaaaataaattgtttttattaaataattttttagttttattttttaagtttttggtaatttttattttgttgtttttttgaatttgattattttatggatttggtataagtggaattttataggattgtttttttgtgattaaattattttatttagtgtaatatttgaaaggtttatttttgttgttgtaggtattttaattttttttttatggttgagttaaattttttgtatgttttattttttttttttttttttttagatagagttttgtttttgttgtttaggttggagtgtaatggtgtgattttggtttattgaaatttttgtttttttaggtttaagtaatttttttgttttagttttttaagtagttgggattataggtatttgttattatgtttggttaattttgttttagtagagatggggtttttttatgttggttaggttggttttgaatttgtgattttagatgatttatttgttttggttttttaaagtgttgagattataggtgtgagttattatgtttggtttgttttgtttttgatttttttatttatttgattgtgggtatttgggttgtttttatttgttggttattgtgaatagagttgttatgaatgtgggtgtataaatatttttagttttttaagatgttgtgtatttttttgaatttatatttagaagtggaattatgggatgttatggtggttttagtttttgttttttgaggaattgttatagtgtgtttataagtgatttttgagtatttgatattgagttagtttaattgaggaatggaatttttatttttatttaaatttaaatagttatattttataaatggtaattatattggatggtatagaattttagtttaatttattttttattaatggggaaattgaggtttatagagtgatttttttttttgaaatgttattgtaagtggttaggttagtataagatttttattgaatttggtaattttgaaattttatatttttgtttgtatgatatgtggttaatatttgtgattttttttaaagattgtgggttttagtaagatggtagttgttttgttgagatttttattgtatttttaggttttgttttgttatgaatatggttgtgtaaggatttgtttgggtttttgttttttatttttttgggtatttagattaattattagtagtatttatgttgatttttagaaaggttttgatttggatagtaattgatatgttattttatagttaaagtaaaatgtagagttttttttttggttttgtagttgggagttagaggttttaggttttggtttttggtttaaagtgattttttgtaagtttttttagtttggtaaataggttatgtattttttgattttttttttagtttttgttttgtgagtttttgggtgtttgaggttgtggtttatttagtgatatttttagtttttagtgtagtttgtgagtagtataatatatttggttttagaaataattaatatatttgttaatagatgtgtggagaaatttaatgtgttgagttaatatagtggattattttttagttataaaaaggtatgagtgtgtgttaatatagatgaattttgaaaatattttaattgtaagaaattaagtataaaaagttatattttttagggttttagttatatgtttagaataagtatatttgtagggataaagtgtagattggtgatttttaggggttgggggagggggagtgattgtgtattgaggatggtgtttttttttggggtgaggaaaatgttttggaattagaggtgatgtttatagaaggttgtgaaaaaatgttatttaattgtgttttttgaattggtggatggtgtaatatggaaattatatttttatgaggatgggagaggaagggaaagaagggaaggagggagggggaaggaaatagggaaggaaggaaaaaagggaggggaggagggagggatggaagaagggaaagaaggtagttatttttagtggagttggattgaagagtttaatgggtgtagtaaattattatggtatttgtatttttatgtaataaatttgtatgttttgtatatgtattttagaatgtaaagtaaaataaaataaagagtttagtgttttttataagtgtttaggagttagttttatagtttagaggatagttgaggtttagaggttaatatttaggtttgaggtttttaagttggtgttgttagattatgttttagataaatttttttatttttttgtagtaagggtgtttttagggtggtagttaggtggaggtgttaggtggtgggagattttgatagtttttttgtaggtttttattttgaatttaggttttatgttagggtttttttgttatttattggtgttggtggtagtaggttattggttttgtgatggggattgtttttaaatttgtttattttggggattagtttttttttttttgtaggtgtttattgggttattttttttttagagttgtaggtgggtttaaggtagggatgaaagggttgtaatttatgtagttttgagttagtattttttgggaatatttgtatttagtgataaatttttattttaattttaggatttgttgaggatgagggaattagattgttgtttgtggttgggatgggggttgtaggatatttggttgggaggtagtgtttagagaggaggtagttattggatatgatatattttaggggtatttatatttattatagttttagggttgattttggtttatttggtttggtgttgagagagggtttgatatagtaggtttgtaaagtttgatttggaaattaagatttaggggttgtttttttttgtttatttttttttgtgtgttatgttgtttggtttatgttttagaaatgtttatataagttttattagttttgttggttaaatgtagagatggtgttgttggggtaagggattttgagttattgtttaatgttatttttagttttaggggagtgatagttgggtttgtattttaggataaagtgtttagggttaagttaatgttatttttttgttttttttaaatttaatttatatttggtttttagagtatggattgaaatggttatatttttatatattttgtttgttattgttaatggtggttaagtagaatgtaaggttattttttttttgtttatggaggtttgtgaagttattgattaggttatggtaggggagttggtggtatttattatattttgttagttttttaggtttgtgtttaggagaaagttgttggtatttatagttggtgtttttgttttggtgaagatttttttgtttttatttattttggtttagtgtgggtttagtagtttttttattttgttttgtaataatgtatattggagtagtttttagttgttttttttttgtaggtttttttgaatttagattttggggttagtatttttgtggtagttttatggttatttgtaggtttttttagaaatttgagtttatgggggtattttaggttttataaattaatagatgttttttgttttttataaaggggttttttaaagttgagtgagtttttgatgtaggtaatgttaggaggatagtgtttggttagggttgtttttttttttttttttatttttttgggtgtttgtaaagttttttagatttttgttgaattttggggaagttttgttttgtaattagggtttgttttttttgtttttatatagagtttgttttttgtgtttagatagtttttttatgatggtaattgaataatgatgtgtgtggtttttttttattataatttttttatatagggtttgtgaagttagatattttatttattatgtttattttagtttggttttttttagagtagtgtagggtttatggtaagttttggtaaaaagtttggtgaatgaatgaataaatgaagaaataaagtttattatagtagttgaggtttattgggggttttttgtgttaggtgttattttaatttttttttttagagagtgggttttattaatgttggttaggttggttttaaatttttggttttaagtgatttttttattttggttttttaaagtgttgggattatagatataagttattgtattgagttttaggtgttattttaaatgttgtttaggagttattataattgatggattattatataattttataaggtagttattgttattgttttattttatagataaggaaattgagattgagagggtttttgttaattatgagggttgtaaagtgagtaagtggtagagttaggatttgaagttaggtaggtgagttttaggttgttgattttttttttaggttaggtttttgggaattatggaaaggttggagaagtatggggtttttgtagttaggatttagaaggtgtagttgtggtgtaggtagtttagtattgaggttttggtttttagttttttttttagttgtttttttttagggagttggaggtagagttttgaattgttaggagaagattttatttgttagttagggaaagttgttagggttttttttagggtttagagttattttaggtttattaaagtatattagtattttagtttttataattttttttgtaagaaagatgatggtattagttattgggttgggttgggggttttagattttaggggtttttttaggtttgtttatggtttttttaggatatagatgtttatttgagaaattttagtgtattaggggttttatagttaaaataaagaggtagagttgttttggggtttttgttaaagtttttaggtagatttatttagtagatattaaaatgtttattttttatttgaaaattttatttttaggaggttgttttaggttgggttgataaaatttatagagattttaatgatgattttttattttaggtatgagtgagtgggtggagggagaagttattgttaattattaatagtttaggaaatgtaggtaaaggaaagagaatggtaaggtgatagggttggaaattagatatatgtgtagaggtgagtagattttagagaaagaattgttttggaataagatggtaaagaaattatagataataatggtagatgatgattttggggttttagtggattaggattataatattgatttatttgataagtatttattgagtgtttattttatagtaataaaaagatgatattataggtttgagagtagttagaatgaaaatagtggtggtatatgggaatttgaagtttatttatttaaatgtttattagttgagatttttggatagatttgaagtagtttttaatatgtaaggaatttataatttgatatagtagtataggatatgtgtgtgttataaatttttggtgaaaagtaaagattttttttagaaaagtatatattgaagatagatagatagatatatatgtattttgaatggtttattaaagaatttttaggtttgtggattttagttaaaaaaataatttggtattttgggaggttgaggtgggaggattgtttgagtttaggagtttaagattagtttgggtaatgtagtgagattttatttttataaaatgaaataaaataaaatgagaattaaaaaaaataaataaatttggtgtgatgagaatttatagaatttaatagggttattttagtattatttgtagtattttttaaatttttgattatatatataaagttttgggttttatagttagagaagagggagagtaggttaaaaataattatttaaggtggaagatgagtttgagaaataaagaggtaagaggagaagattgaggttagttgttttttatttttgagttttggtaggaggaagtttttaagtgagaataagttgttgtttgtggagtggattttagagtgggtggatagagatgataaggaatgttatttttggggggttttgaaaataggatatttttttattttaattttgttttttattgtattgtgtttttattgatttatttaagttattataaatattttataaatgttattggggattttttgtttttttttaaagatggaaatattgaatataaatgattaaattgtgtaaatgtgtgtgggtgggggattaaggattgaatttttaaaatgtatatagtttatttaatttgttaattaattttaaattaaattatattttatattttgtatgggataggaagtgtttttttaaagtttggttaggatttgggatgttggaaatttgagattttgttttttttttttgagatattttgaaattttgtttagaaattgagtataatggttttggttttttagagaaagatatggatttgtaaaggtaaagagttgtatttttttttgagttggagttttttttggtttttattatggggtttaaataaaattgtagttttatagtttttttgttggtgtttttttttttttggtgattaataaggtggaagagttaataagaattttgtgtgtttttttgtaggatttggaagggataggtggtgtgagtttgtttttatttagtttttttttttatttatttaggggttgaggtgtttttgaggtagggggtgggggtttttatttttattgttggttaaggtttttttagttttttttttgttaaatttttttaagtaaattttttttttattgtggaggaaggaattttaagtagttttgtttttttgttagtatggttttaattggttttagttggtaaagttaaatttggataaggtttaagggttttttatattatttgttgttttttggaagaggtttttttttgtttttttatttgtaatttattatttttttagtttgagtttttttatttaggttttgtggtttattgagatattaattttgggttagagtaagttttgatttgtaaattattattatttattttttaaagagttatttttagaatttaggttgtagggagggtaggttaaggatgaattttttgatttttggtgtggtgtgtggtggggggggttattttatattttgttttttgttgtttttttgttttgttttaggttttgaagtggatttattgtagagggagggttagggaatggttttgatgttttttttattttaaggaattttttagtaggagtggtttttattttaaagtaattttaagatttagtttgtgttagttttttagttatgtttatagtggtttgttaattagagatttttttagtttttggtaaatttgtaaatttataaagagaaagaaaagtttttttgtgggtgggtggatattggttatttgttataggttggaatttttttttattagggatgttttttaagtaggggttggggagggtagggtttagagtttttttttttttagttttttttgttattagtagatttgttagtagatatatagtagagtttagtagtgaggtaataataggggttgtgggggttggggttttgttttttttaatttatgaaattatttgaaataataaaatttagataagggtttttggggtgtaatagggtggttttttgttaggtgttgggtagaaaaaaagtttttttttaatttttttttgttgtgtagattagtttgggttttggggatgttgtagaggttgttttatgtttaggttttttagagatagtagggggttggaggtatggtttgtttgggggtaggggataggtagggaggggtatatttttgggttatgagtaggagtttgattaaatgatttttttaggagggagaaagatattgtatataattgtttgattatagttagaggggttggaaaggtgggggaaaggggtgaaggggttaattgttttaggtgtttttaatttatgtagtatttatttggattgataagagttgagagattggaattgttttttttttttgtttttaggttttgttttaggagtttttttgtttaggagtttgggagttgaggaggtttggaagtagtgggtttatagtgttattgttttgggaatttatagtgttttggatgtggtttttttggttttagttttgtaggtagtttatttggattgtatttattttttagaagagttgtttagaattttgtatgtttgaaagaaagattaattaaagaagtgaggaagttaaagagaggtttatgaaagtttatgatgtattttttaagtgtatattttagtaattttaaatgttttttgaagtaaggatggggatggatggttggataaatggatgggtgtatgggtgtgtgaatgggtgagtgggtgggtggatggatggatagatggatgaatggatgggtaggtggatgaataggtaggtgaatggatgggttggtggatgaatgagtaaatggatgaatgattggatggatgggtggatgagtagataggtggatgagtgaattggtggatgagtggatagatggatgagtggatgagtagatgagtgaatgggtggatgagtggatgggtgggtgagtggatgagtagataagtggatgggtggatgagtggatgggtagatggatgggtgagtggatgtgtggatgagtggatggatggatgagtggatggatggataagtggatgggtagatgagtggatggatagatgagaggatgggtagatggatgggtgagtggatgggtgggtgagtagatgggtggataagtggatggatagatgagtggatgggtggatgagtggatggatatatgggtggatagatgggtgagtggatggatgatgagtggatgggtggatgagtggatggttgagtggatggataaatgggtgaatgagtggatgggtagatgagtggatggatagatgagtgaatgagtggatgggtggatgagtggatggatagatgggtgaatgagtggatgggtggatgagtgaatgagtgaatgagtggataggtggatgagtggatgggtggatgagtgtatagatagatgggtggatgggtggatgagtggatgggtgggtgagtggatgggtaggtggatgagtggatggatagatgggtaaatgagtggatgggtggatgagtgaatgattgtagataggtggatgagtggatgggtgaatgagtggatagatgggttgataggtggatgagtggatgggtggatgggtgggtgtgtggatgggtgagtgagtggatgggtgggtgggtggtaagatgggtggataggtatatggagtttatttaaggagttttagaaatatatatatatttttttattttagattttttttaggaaaaagtagtgtgtatggattgttatttggttatattttgagatagttatttttattttttttggaatattgtttggggggatgtagtatagggtatttaagtaatttttgagtttagggtagagatattaggaagtagtaggtaggttgtgattttgtaggtttgttttatggtttttgttgtttgtattatggtatgaagtttagatgtatttttggatttggggttttgattagatggagttattaattttttgaagaatgaaatatataggggttatttttgttttttagttgtagggaatgatgattatttagttttttttttttttaaattttttttaggtttttgtgtatggttttgttgattttttttttgtttttggttatttttttagtttttgttgtttttttttttgtttttatttatggagttagttttggtgttttgagagtttttttttttagttgattttatttagtttttgagtatttaatgttaataatgttattttttttgtttagatttatatttgagtgttagtttgatttatagatgtgtttttgggttttgttgtgttaggttttttgttgggttttgggtatttgtagttattgttattgttaagttttaatatttgaaggtattttgaatttaatgattgtgttttaggttgaattttggagtttttattttatttgttttttattttattttttatttaagtgaatagtttttttagttaatagttattgtagttagatttttaggggttgggtttgggttttttatttttattattttgaatttatttatttattttaaatttttattaatgttaatttaatatattttatagttattattattagttgtttttgtttgaattttttttttttaaagtattagggggtgtgtgtaaaatttattaatttgatgatttttttttatgaagttgtgattggtttttattgtatttgggatatattagatttttgtggttttagaattttgtttattattgatgtgttgtgtgattttgagtaagtaatttaattattttgtgttttaatgtttttatatgtgaaatgggataataatatttgttttataagaatgttggggattaaatgagatatttatttatgaagtatatagtgttgtgtttggttagtaaatgtttgaagtttttgttaataaaatatatgtttttaatttattttttagtttttatttatgtatagtttttttggttgttttttagtttttttaataaggttatttatagaggttttttttgttgggattattttttttttatgttgtttttagaatttttatttgtttttttgggatagtttatttatattgggttttttagtttttgttttgttttgttttgttttgttttttttgagatggagttttattttgttgtttaggttggagtgtagtggtattatttgggtttattgtaagttttgttttttgggtttatgttatttttttgttttagttttttgagtagttgggattataggtgtttgttattatgtttggttaattttttatatttttagtagaaatggggttttattgtgttagttaggatggttttgattttttgattttgtaatttgtttgtttttgttttttaaagtgttgagattataggtttgagatattatgtttagtttaggttttttagtttttatatatgtggttttttgattgttgtttggggtttgttgtatttattatttataaaattttatatgtttgaagtatttagtaagatgttgtgaatgagtgaatgaataaatgaatgaatggttagtttgttgtttttttgtttggttttttgttttttttagattagtatgggggtagttatggtttttgtttattttggtaatattgttttttttgtgttggttgtgttggttagagtttttttttatggtgtttttgtggttttggtgtgtggttgtttgtgaatgagatttatgatttttggtttttattatttttttggagttataaagtattaaggtggaaggatggatgggttttttgggatagttggggtgggaggttggtttaggaaattttttttaggaaatggttagtgtgggatgaggtgtttggtgggaggggagtggagtggggatttggggtttggttgttttgtagttagggattttaatttttatttttttttttgtttattttttaattttagtgttgggtttagggtttttggggttttttttaggaatatagaagatatagtaaggattagggatataggataggtagagtttatgggtaggaggtttttagttagtatatttgagtttatgtttggttttaattagatattgagattttggttaggttattttttatgttgaggtaggggggttttttagaggttattggtttttaagtattgtgtggaagatatgttatggagagttagtattttttgagatattagtagaaggttagatgttttgtggtttaaggatgatttggttttagtgtttatttatttgttgttttgtatgaaaagtttgatgtgatatggttggttttagtggaagagtgatttgggaattggtagagtggatttagtaattggtaaattggatttagtaattgagatattgttaggggtttggtagaagttttttaatgtattagatttagttttgatttttatagagtttagttgagtattaaaaggtgtagaggttgagttgagtattaggggaatattgattttagggttgattggtgttgtgtgtgtattttatagtttatagatggtttatatttatttgattgtatttgatttttttttgtgaggttttttttagattttttgttttttaaagttattagttgtgttttttgaaattagagtaaagtaataaaattgtagtaatagtgtgtttttatgaatgttgtgatgttagttggttaaatgagggagtttttagggttttttatattgttttgattttgtgtgttttttggttttggtttattttttatattttttgtttttttttttttttttttttttgaggatttagggtttggggttgatttattgtgggattttaatggtgattttttggaagaaatgtttgttttttttttttatttagtagtgatttttggtttgtttatgtttatgtagttaatataggtagtagttggaatttggaagtttttggggtgggagtttgtttttttttaggtttttttagtttgaattttgggaaggagttatatttatatggtaattttttttaaggttgggagggggaaggggtttggtttgggtttgattatttttttgaggttgtgtttattgggttttttaagttagttgggttttttggttgtatttttgagggatggtaatagattatagtgtaaattgtttattggttggttgggtagtgggtgtttagatgtgggttagggtttttgttttataggttgtgtggtggtttaaagtgggtatttttatgggtatatatttgtgttatagtttatttgtgtgtgtgtgtgtgtgtgtgtgtgtgtgtgtgtgtgtgtgtgtgtgtgtgtgatagtttagaaatatggtaatttatagtttttttaagatgttggttttgggagatttgtttatttgggggttttagtatttttagttttttttaggaaggttttgttttttttggtttgaagttggttttagggaagaatttttttagaaaaataaaagttattttttttagttttagtttagtttttttttaggggtgagttatattaaatttattttttttttttttttttatttttttttttatgttgtaattagttgtaagtggtttatttatttaggtttgttagtttattatagaaaagatatttgaattttgtattttttttttttgatttgttttgggttttaataggtaaaggaaattggaagttagtagttaggatttagttgtaggtttttggggttattttgtgtttttattttagttttatttatttttgtgttgatttaatgtttatttattttagtttatggagtgaggtttggatttaagataaaataaagggggttttggttttttggggtttatagtgtttggtgttggtgagataattttagagtatagtatagagaaatggttgtgatatggatttgtagtatttggttggttaagtatagtaatgtatttttattaggtttgggttttttagtagatatatggtttaaaggttggttggttaaattatatgattttgtaattatttaagagaaatgaaaatatgtttatataaaaatttgtagattagtatttattgtagaattttttataatagaattatgttaaaaagtagaaataatttaaatgtttattagtagatgaagagatatatagtgtggtttatttatgatggaatattatttggttatgaaaaagaatgaagtattagtatttgttataatgtggatgagttttgaaaatattttattaagtgaaaggagttagatattaaggttatatattgtatgattttatttatataaattatttagaataggtgaatttatagagatgaaggtagatgagtggtggttaggggttgagagtttggagttgggaatggggattggttaatgggggtagggttttttttggggatgatgaaatgtgttgggattaatggtgatggttgtgtaattgtgatggttaattttttgtgttagttgggtgtagtggtttatgtttgtaattttagtattttgggaggttgaggtgggtggattatgaggttaggagattgagattatggtgaaattttatttttattaaaaatataaaaaaaaaaattagttgggtgtggtggtgggtatttgtagttttagttatttgggaggttgaggtaggagaatggtgtgaatttgggaggtgaagtttgtagtgagttaagattgtgttattgtattttagtttgggtgatagagtgagattttgttttaaaaaaaaaaaaaaaaatttttgtgttaattggattgggttatggggtatttaggtaattggttaaatattattttgagtgtgtttgtgaaggtgtttttggatgagtttaatatttaatttttttattttttagaaagtttagtttattgttagtatttatttaattttatataaatatgttttttgaggttgaagtaaatttgattggatgttttgtgtgaaaattaaatataaaaattggttaggtgtggtggtttatgtttgtaattttagtgttttgggaagttgatatgggttaattatttgaggttaggggtttgagattagtttggttaatttggtgaaatattgtttttattaaaaatataaaaaattagttatgtgtggtggtaggtattttgtaattttagttaaatttaggaggttaagattggagaattatttgaatttaggaggtagaggttgtagtaagttgagattgtgttattgtattttagtttgggtaatagagagagtttgttttaaaaaataaaaaaattaaaaagaaaaaaaattttttaaattgtttttgtagttatttttaagtaaaataatagagttatttgagttgtttattttggaaaaattagatttattaaatgaatttttagttaataattgattaagaataatgttaatattatttgtaggaatgttgtgttttttaggatttgatatttttagtgattgagaattattatttttttttaaattttatttatttatttattttttgagatggaattttgttttgttgtttaggttggaatgtaatggtgtgattttggtttattgtaatttttgttttttgggtttaagtaattttttggttttggttttttaagtagttgggattataggtgtttattattatgtttggttaatttttgtatttttagtagagatgggattttattatgttggttaggttggtttttaatttttggttttaggtgattagtttgttttagtttttttaagtgttaggattataggtatgagttattatatttagttgagaattattatttttttttaaaggaaatattattattaaaaatggaatgttataaatagaatgatgttttttgtttttaaagttgatatattagagtgatgtgaaaataataataaaagtaagatattttttggtaaatttattttggggtgaatgttgtagttataagtattgttggtgagtatttttggggtaaataggaaaagggtgtaattaggagtttgggtaaagtagattgtgtgttttgatgggggtgggttttatttgattagttgaaggtaatagggtttggaatgtatattttaagatatagtgttttggtatagtaaatatttttagttgaaggaatttaagaaatggtaggtttaagaagaatttattgatttgttttttttttgaagtagattataagttttttatgtaagaggtgttttttttatatttagtggaaaggaatagttttatttttagagatagaggatttgagaggggttttagtatataggttttgttgagatttttatgggtttattgtttagtttattttttgttgttttgttatagttttttatgattttttattttttattaaatttagtataaaaatgtttaggtttaggttaggtatagtagtttatatttataattttagtattttggaaggttaaggtggttagattatttgaggttaggagttgaagaatagtttggttaatatggtaaaattttatttttattaaaaatataaaaattagttgggtgtggtggtatatgtttgtagttgtagttatttgggaggttgaggtatgagaatggtttgaatttaggagatagaggttgtagtgagtagagattatgttattgtattttagtttgggtaaaagataagtaaaagaaataaataaaaaaattgtttaaaataagtaataaataaatttaaaaaataagtaaaataaataaaaattgtttaggtttaggttgggtatagtggtttatatttgtaattttagtattttgggaggttaaggtaggaggattgtttgagtttaggagtttgagattagtttgggtaatatagtgggattttgtttttataaaaaataaaaaattagttaggtggggtggtatatgtttgtagttttagttatttgggagtttgagttgggatttaagagtgggtttagagtagtttttggggttggtagttgggttttagtttgagtttaggaagttaaggttgtagtgagttgtgattgggttattgttttttagtttggatgtgtgatagagtgagattttgttttaaaataaaataaaaattgtttaggttaatggtttttttgggtttttatttttttatgaaggtttggtgttaagtaaaatttatttgaattgttatgtttgttttttgttaatttttgttagtttaatttttagggttttagttaatgaatttaaaattgatagaaggaaagggtttttttttagattttgttttgattaggtttttgtaattttgtgataaaggtttgaaggtttgaataggaggatataaggtttgagtgagagagaattttttttgtttaattgtttttaatttggaatattagattttttttgttttagatttaaattgatatatgtgttttttttgggttttgggattggaatgatgttattggtttttttgggttttgggtttttaggtggatattagagttgtaatatgggtttttttgtgtttttagtttgttgatttattttgttaattttggtatttgttaatttttgtaatgaggtgagttaattttttataataataaatttttttatttaaatatatgtatatattttttattggttttgtttttttggatgattttaatataattattttgtgaatatagtaaaattattgaattgtagattttaaaaaggttaatgttatagtatgtgaattttatttttataaagttattatttaaatagtaataagaagttggtgagttttgtgtatttttttgtaaataagagtagggatagtgttgtttttgtttttggatgtttttagtttttagtttgagtttaggaatattttttatgtgtttttttttttaattttgtagtttaagggtgggggtggtttttagtttggtattttttttgtagttttttattttttttttatattagttaatggatatagaggtttttttatggatttttatttttatttatttatttttatttttttgagatagagttttattttgttgtttaggttggagtgtagtggtgtgattttggtttattgtaatttttgttttttggatttgagtgatttttttgttttagttttttgagtaattgggattataggtatgtgttattatatttagttaattttttgtatttttattagaggtagggtttttttatgttggttaggttggttttgaatttttgattttaggtgatttatttgttttagttttttaaagtgttgggattagaggtgtgagttattaagtttagtttttttatagatttttaaaagggttttgggtaatatagattgggatttgttaagttattaaatgatttttttaaataaagaaggaagttataaatttttatttaaaaggagtgggggatggtaatagaaatatagttagttagaagttggaagggttttatttaatttatttttaaggtttttgggtagaagggataagggaaaatttgttttttaaatattttatttggtattttattttttggatgtaagatgtagttgtgtatagtggtagtagtgaggattttggtttggtaggtttttatattttttgttgagggttttaggggttagggttgtttaataggattaagaggaaatgattataggagtttttagttgttgggggtggtttttgtggttttttgggttatttttggtgaatttattttaaatttggaagaggtttaagtttttttgttttttgtattttaaattttagttatgttagttaggagttttgggggatgagaaaaaatttaattaagttttattgtgttgggtgatataggatttagaaggagaggggtttttggattgtttaagtttaatgataattttagtagttgggtttttaagttaattagtttttttttttttagtagtttttggggagtattatggtgagttgtgaggagttagtttagtatggtatatataatgtaggggtttttttgtatttttattttataaatattagggttttttgggggattagttttttatttttgagttattttttttttattgtttttttaataaggaatagagaaggagtttttattgtttaattagatgtagaaattgatgtatgtatagagaggttatgtgtgatatggtttggatgttgttttttttaaattttatgttgaaatgtgatttttgatgttggaggtaaggtttggggggggtggggtttgggttatgggggtggattttttatggatggtttggtgttttttttatggttataaagtttgggagatttgattgttatagagtttgggagggttgggtgaggtggtttatatttgtaattttagtattttgggaggttaaggtgggtggattataaggttaggagtttgggattagtttgattaatatggtgaaattttatttttagtaaaaatataaaaaaattagttgggtgtggtggtatgtgtttgtaattttagttatttaggaggttgaggttgtagtgagttgaggattgtgttattgtattttagtttggttgatatagtgagattttattttaaaaaaaaaaagagtttgggagtttttttttttgttatgtgatgtgttagttttttttttattttttattatgaggaaaagttttttggggtttttttagaagttaagtagatgttggtattatttgtatagtttgtagaattgtgagttaaataattttttagttttggttattttttatagtaatttaaaatggatgaatataatgtattagtttttttttttggattttatagtgtgtttggttggggttgtgttttggggaaatggtaattgtgaggtttttatagattgggtttgggttttaattatagttgtattttagtgttttgatattgttgagtggatgtttaaaaagtattgttgggtgaatgtgtgagtgaatgatgaagatggaggtggttgttggtgttagggtaaggttttaggagtttggggaggtggtattaggtagtttaggttaatggttaattttggatagggttaggaggtagttagaatggttaaggatagttaagggattttaggtaagtggttttattttttttaggtgggtaggaagtaggaattagattaaggggtgttaggtggtagtggtatttagggggtttgaggagtaggtgtaggtttagtagggttggtggtgttatgtgtggggttgattgtggttttgtttattgtttttattttttggatgtatgggtttatggtttttaaggtttttttttgtttttatgtttatttttttaggttttatttttagatgttaagttatttttttatttttattttttttgttgtttttatatttgagttgattttttttttgagttttggtgaaattttagagagtttagaggtgtagtttatatttttgtgttataaggtttttgtagtttttatttttttgggatattttattttagagttgggtgtgtatttattttattggattagaaattttaggaatgtttattttgtatgtttttgttttttattttttgtttgttatttagtttgtggttgttatgtggttgggttttggtagttattgtagttggtaatatataattagtatttttgtgtttaggttttgtgttgagtttttttagttttatttttgtttgtttttaaaatggtttttgatatggtaattattattatttattttttagataaaagattatagttttaggagaggaggaatggtaggtttgaggttatgtggtttgtaataggtaaatggatttggtagttattttatttttgagtggggtttttttttgtttgtagattttgttgaggttttagagtttggagttagtgagtttttattgagtataaggatagtggtggtgttggggttggaataaggtagggaggggttttttaaattatagttttggttgtggatttattttgggattttgttttggttgggaattttgttttagtttatttgggatatttttttattttgagttttgtattgggttgtgtatggggtttgttgaatgagtgagggtaggagggatggtgagtagggtggaaagtgattatggtgggtaggtttttgttggaagtttgaaatatttttggtgagtaggaaaatattaggggaagaggttatagtttttagaagggtttgttggggattgttttgtagtttttttattgggataggtagaaaatttagtttttttttagggtgagtttaggaagtttgtgggggtataggttttagttagggtggtgtgtgggtttatttaggggatgttgttgtggtttagagttaggttaaattttatgtattttgtaaataattatttataataaataaggtttatttattttttaagaagagtaaaatattataggaggtatttttttattaattaaatatgttatagtgattttattgtgttattgagggagggtattagggtgtttggtttagagtaaattgtggttagggggatgggtatattgttaaattggttagatttttatttttgaaaatgtgggttaaattttttttaataagttataaggaaatttagtgtgaattttatgtttttattattattggttgttttggaagattgggaggaggggttttgttttttttttatttttggttatagggtttgaggttataatttggattgggattttaattttttttttggggaagaggtttatttagggtgtttgttaaggtttagtgtataaatatggaatttgtttaatgtttgttttggtatttttgggttttttatattgggtttttttatttgattttttaagtagtgagagtgatgggatatggggtgtttttaggggagatttggggagatggagtaagttttttagtttaaggtgaggttttgaggtatggtttatgtagtgatgttttttatgggaggtttgaggtatgattaggagtttggagatttagtagaggtttgggtatgggatttttggtatgtagttagagtgagggttgaggttgtatggatgtaagtaggtgattttgtgttattgggtgttatttgtgttgggttttgtgtagttgtttttattttattgagttttagggaggtgaggtaattattttaggtatatagttttgggggtaaaggttggatttaggtgtgtttgattttagaatttaagaagataagtagaggagtttgagttttttgagattgtagtgatggtttagtgttttaggatggttaggttggtttttgtagttttagttaattgtgtttttttttagttatttagggttttagtgttggtttttgagatttggtattggttataggggtttatttttggttgtggatatttagtgttggttattgggatttggtattggttgtggggatttgtttttggttgtggggatttagtgttggtttttgagatttggtattggttatggggatttgtttttggttgtgggtatttggtgttggtttttgagatttggtattggttatgggggtttgtttttggttgtgggtatttggtgttggtttttgagatttggtattggttatggaggtttgtttttggttgtgggtatttggtgttggtttttgagatttggtattggttgtgggggtttatttttggttgtagggatttagtattgtttatggggtttgtttttggttttggggagttagtagtgtttgtggggtttatatttggtggtggggatttggtgttggaggattttgatagtaaaattatagaggtgataggtaatagtaatttattagtatagtgtgtggtttgttttagttatggtatttttttttattttgtgtttttttattataaagtttagtgtaggtaatgaagttaagaggtggagaatttgtaggaggatgtatattatatttgttttttgtgtggtgtttttgtattttgggtggttgagattttttgttttttttttaggtttttttgtgttaggtttgtgttgttttttttggttttggtttttatttatttggttttttagttatagatagtagtgatttttttttttatttaatggggttattgtttagtttattattagtttttagggttggtagatgatattggttatgggtagtgttttttttggttttagtatataaggtataaaagatattattttgttttaagatttttttagttatgtggtgtatgggaagtggtgttgggaattttttagggtagttttttgttttgggggagattgtgtttaaatttttgaggaaatgttgttttttggttttttttttgaaaaattttttaaggagattttgtgtggagtgtgtagggagaatggagatttttgtgagattgttttgggatagttttatagaaattataaattatttggataaaagttgaaaatttgtggttatataatgttgattatttatttaaatatttgttgagtaagtatttatgatgtttgggaatttaggatgtggattgataagatataatttttatgtttgttttagtgatagagagagagatggtattattaattttgtttgttgggggtttttttggagggggtgtgtaggtttagggttgaatttgtttagtggatgtgttatttatgtttgtgtattttttggttttgtggtggtttttggaataaaggttgagagataaaagataaggatttgggggagggaggatgtttatgtatattttattggggatattagtaaggatgattgtttagtgattatttagtgattgagttatttggtgtttggagtttggtatttatagagtagggtgggggtagtaggttttgttgggggtataggtttgagaagggagtgttgttagttaggtttgatgggatagagagtgaagggttttttttttgaaggttatgtagaggttggaggttaatgttagtaattttattaatgttagttttttgagattgatttagagttggggttttaagagtagttttgggtgtttaggagttaagattttatagagggtgttttttatttttagtttagggaaagtgataaatttggagtgtttttgtttatggtttaattattgaatttaaatgaatgtattgataaattgtatttagtgttatttatagggaaaagggagggaaaaaaaaaaaagaaagagagttaattgtgtttaggttggttggttagggggaggatagatgggttattatttttgttattttttaggttttttgtattgattttttatttttagtaaaattaaggtttagtttttttttgtagttttggagttggttgggatgaagtaatttttgtaggtagattattaggtttattgtgatggttttagtagggaatttagtttaggttatagtagtttaggtgtttgtagaaggtttagatttttgggtgttaagttttttttttttgtatttgttttggggtttggtggggtgggtagtgtgtgatttttagggttgatgaaagagaggaggaagaggttgagtggtggtgagtttgaatagttaattttgggaggggttgaggtggggaaggtttttattgttgttttataggttttggagtaaggtttttatgattttattagtagttgggtaggtataggtttaggtgttgagtgtgttaggatttttgttgttttttgggtgggggtgagagggatttttatgggtttgtaattagatttgtgtttttttagttaattttttattaaataaatttatatgtatagtggattgggtatggttgttatttttgggagtttttttgggaaagttttttaaggttttgttgagttttgggaataggtttttatttgtttgggaattgggttggtatttaataaataaattaaagtttggtgttggaaggtagaattttgggattagagttttagttaagggttataagttttttaggaagttttttttttaaagagtggttgtgggatgttgggagtttttagggtggttagtttttaggtttttttaaagtttaggtggtattgatgttttgtgttaaggtgagggttgtagagaggggttggtggggaggagtttttatagtttattttggttattgattttatttttaagtattgaaataaagttttttttttatatttttggttagggagagagggtggaagttttaaatatttggggtgtatgggaaaggtttatatgtatagaagaattagataatggaagttgttggtggtggtgataggttttttaaaggggttttgagatttttgatattggtagggaagttatatattgtattaggtttgggggtagggagaaggggtttttaaggatggggttgtttttttttgtggaagtgttttgtattgtttgataagagtagtttggattagttgtggtataataggaagttgggagaatatggtggtttaggaggttggttagggttggggagtggttaatttagagattttggttgtttaagtgggtttagggtttttggggtgaaagtttttgtggagtatagtggatttagtgtttggaggatagattttaggtttagataaggttttttttttttttttttgagatagagttttatttttgttgtttagattggagtgtagtagtataattttagtttattgtaatttttattttttaggtttaagtgatttttttgttttagttttttgagtagttgttattataggtatgtgttattatgtttggattagttagtatttttagtagagatagggttttattatgttggttaggttggttttgaatttttgattttaggtgatttgtttgttttggttttttgaagtgttgggattataggtatgagttattgtgtttggttaataaggttatttttgatatggaatgttggtttgattatagtgtttgatggtttttgtttgtaattatgtttttgttttttattaaagtagggtttttagggtagaagttgtatttttttattttagagtgttttatgttattttttaggtgtatatagtgggttttttttattgtagttgaattggttttattattattataatgatagtttataggggtgggggttagtgggaatataaagtggttaatgtaatagtgttttagttattttgatatagaaatggttaggggatagaaggggtaagttgggagttagtagtaatttaggtttttagagatgagtattaaaaaaggtgagttatattataggttttttttgattatattttagtttaaaagagatttaaggagaaataagaattttatttttttaataaggatttgtatattagatgttaagtaaatattttttttttttttttgaaaaggagtttttggggttgttgggggagttggttaaagagaatgatatttatggaaatatatgtggttttattaagttttaaggtaaggtggtaatgaatggaggaggaaaatttatagtattattagggaatggggtttttttttgttttttttttttttaatgggtttttttatgtgggatttaaattaaattttaattttattttgatttagtaggtgttgtttttatagttttgaatagatttgttagaaaattattgtttaatttgtttttgggtggtatatttttttttaggaaaggaattataaatttattttagatgagtagagagttgttttttaaatttttgattaaaatatagtagattttatatgaaaaagtaaagagagaggggttagggatgaagtgtagtaggttggaggttgagttagtttttagagttattgggatggtgttttaggagtagatggtattgtttataaagttttttgtttttttttgttttgaggttggggattattttgttggttgtatgatttagtttttggggtttttttagtatgaaaagattttttgaaagtaggtttgttagggagattttttagtttttgtttattgatatgtttttgtatggttgatatgtagtatgttattgtagagaagtaaagtatatgtagattagttttgttagtagtattttttttttttgttttttttaggaatgttttgtatatatttaatatatttaggaatttagagttgtgttgtagtagtagttttttggattttagtgttggtgttgtggggagttttggttatggtattttgagtattgagattatttttagtttttagttagttggtttttgggagtttagaggggtgataatttgagtggagtgattttagagaaagtggtggttaatttgaatttttttttggtttttttggaagttagggaaattttttgtgaaaaggaaatatgttttaagaagttttgggtagtaggagaatttagttatttagtttagttggttaaatatttataaagagatagttgtgattatataaagttttatttttttattttgaggttgaaaatttggtttttgtgtggagattgagttttttgttattttttttttggggattttgtttggttttgttggttttgggttggggtttagggatagtgtggtttttggtattgttattatggttattagggtttgttttgtggttgtgttatttgagagtttttgagttagtggtgtaaggttgggaagaataaaggagtaggatttattttagtagtggaatgttgggttgtgttggatgtgttgagagttgtggtttgtttattgggttatatggtttagagttgagtagaggattaaaggggttttgtggttgtggaataaggagttttttagagtgtggggtagaggtagggagggattttgattgtttgggaagggaggtttggtggggaattgttttaagggggtagggtgaggggagtaggaggagggggtaggtagagataggggtgtttagtggtaggtttggtgtagaagtaatttgaaggtatgggagggatgttaaggagttgttatatgttaaaggaaagtgatagggtttttgggaagagtgagggggagttgttaggaagaagagaggggaagaggtttttagggatttttggttatgttgtttttgtttttgtttttgtgtttgttagaggtggtgtttgtgaggagttttttttttttagttaggttttgaaattgatttggatattttttttttttgtgttttgtttgatatttttgttttttaggtgtttttttatttatttgtttagatattgttatagttgggtttttagggagtatggttagttattttagaaagttatttagatttgtagttagggttggaatatagttatttgggtttgttttttttattttaggtgtttgttggttgggattatggaagggagaaggagtaggagaggaggggtaggggatgggggtgtagtttattttgagttttttttttgagagtttttggatttagatttgatttagtttttgtttttttagtttttttagtttttgggggatttggttagtgagttagtttttttttttttttttttttgtaggtttgggatgtgttgggatttagaggggtataagtaagggggtttttagaggagggagttgatattataggggttgggtttggatgttgggatttgttagatttattttagtgttatgatttttgaatttaagtgagttatttttagtaggggtgtggttatttttatattaggagagagtgtttgggagtgggtttgttttgagggtttgttgggggttgggagggatttatttaaatggaaagaagtttttggtgatattttttgagggttaggggttgaattttggaagttatgtttttaggtagtttttatgggattttatgttgagtgttgattgggttttatatatttttattttttttattttgtatttttatatgtggttgggggtgattgaagttttggggtatttgttatattggttaaataggttagttatgtttagtggttttttagttagtagttattggtatttgatttgttgttttttattttttatggttaattttttttttaaggttttttggttttatggttttttttatttttatagtgaatggttgtggggagttgttgttattggtttttgggtgttaggttagagttgggggagtgtttgggagaagattgtatgtttggagtttttgtttttatttgaatgggagggaggttggtggtagattagagatttgggttttgagttaaatattgaaatttaaggttttgggtttgttatttaatatttgtggaatttgattttttttatttataaaatgggtattattaatattagttgttaaaattatagtaagatatatatgtttaggttaggaagtgtggttatttagaaaatatagttttttttttttttaagaagttaatttttttagtattgggagtgagaagagtttgttttttttattgtttgtagtttagtttagggtatttttattattggtttttaaagggtagttttagaaattgttgataaaggatgttagaaggaatttttttttggttaggtgttagggttaatagaaagttttgaggatgtagtttttattatgtttttgttttgtgggtttttttttttttgtgggtagaattttttttttttggtttttttttttgaatttttttttttttgtttttggttttaatttgttttttagttttttggttttttaggttttttttagggtttaagattttgtttttttttaagtttagttttttttttttttttgtttttggatttttgagttgggaggttagtattttgggtgttttgttgaggtggttgttttttttgtagtggttttttttgttgttattaaatgagggtttttagagtatagagaaggtatttttggtttggggttgtattttttatataaagtttttgttttttagtattttttaaagttttttattgtttagtatatatttagtatttaggtagagtagttttagagtttttttggttggtttttggtttaattttttagtagaaatggtatatgggttatagatgtaattttatattttttagtatttataataaaaaatgtaagaataagttaggtatagtggtttatgtttgttatattagtattttgggaggttgaggtgggtagattatttgaggttaggagtttaaaattagtttggttaatatggtaaaattttgtttttattaaaaatataaaaattagttaggtatggtagtagttatttgtaattttagttatttgggaggttgaggtaggagaattgtttaaatttgggaggtaaaggttgtagtgagttgagattgtgttattgtattttagtttgggtaatagtgtgagattttatatttaaaaaaaaaaagaaaagaaaagaaaaaggaaattattaaaaaatgtaagaataggtgatattaattttaatattatttatttaatagagtttaaaatattattaatttaatatgtaattaatgtaaaaatgatagatatttgatattttttttttttttttttgttaggattttgaaatttagagtgtattttatatatatggtatttttttatttggaattattatattttaggtgtttaaatggttttgtgtagttagtggttattatgttggatagtgtagtttggagagttttaatttttttttttttttttggttgttggggaatagagttttgttttgttatttaggttggagtgtaatggtgtgattttggtttattgtaatttttgttttttgagtttaagtaatttttttgttttagttttttaagtagttgggattataggtgtatattattatgtttggtggttattttttgtatttttagtagagatggggttttattatgttggttaggttggttttaaattatagattttaattgatttgtttgttttagttttttgaagtgttgagattatatgtgtgagttattatgtttatttttggatagttttaatttgattttaggataatattaggttattagagagttgttgatttggattatattatgatttgaattttttagattatttttggtattatgtttataagttatatttagaggataataggatatagtttggtgaaatatatagtggtattttttataagatattggtgaggttatagattttattattagtgttatttgtttggggatattttatttttagaaaatgtagagttttttttaagaaatgaatgtggttaggtgtgttggtttatatttgttattttagtattttgggaggttaaggtgagtatattgtttgaggttaggagtttaagattagtttgattaatatggtgaaatttagttattattaaaaatataaaaatttgttaggtgtggtagtgtgtgtttgtagttttagttatttaggaggttgaggtaggagaattgtttgaatttgggaggaggaggttgtggtgagttgagattatgttattgtattttagtttgggtgatagagtgagattttgttttaaaaaataaataaaaaaagaaatgaatgttttaggtatatgttaagtattttttagatgattttaaagatattaattattgtgattgatgatgatttttttttttttttgggtgtgtttgttttgtttttttagtttataggtgtttaggatttaaaggtagtttgttataggttatgggatttggttggtttaaaagggagagtgaggttattggaatttttttaggagtgagtttgaagtttggaatgttttttggtggagggttttgaagttaggaggtgatgtagatgtgggggttgagatattatttggggttatttgtaaagagggatatttaggtagtgattttaaggaaagagtaaggggaggagagggtggtatatttatgtttttttaatttttgtttgtttggaggtttatgtattttatatgttggtttttttgtatggatatttttttaataagtaatttattgtgtttatgtttatttattttaaagttatatagaattgtatttattaaaaatgaatttatggagatagaaagtattttggtggttgttaagggttggagagggtgaatggggagtgagttttttatggatatggggtttttttttggggtgatgaaaaagttttggtgttagatagtgttgatggttgtatgatattgtgaatgtatttagtgttattaatggtaaattttatgttttgtgtattttagtataataaaaaaatatatatttaaagtaatagaatttaatgtgtttttttttttttttgagttagtttgtttttttgttttatattttaaaattagaagggttttgagatatattataggtttttagggtaggttgaataattttttttttttaaattgtgttattttatgtggtaatagggattttgtagatgtaattgaagatgttgagatgaagagattatttaggtgggttttaaattataagtgttttttaagagggaggtaggttaggtgtgatggtttatggttgtaattttagtattttgggaggttgaggtaggtagattatttgaggttaggagtttaagattagtttggttaatatggtaaaattttgtttttattaaaaatataaaaattagttaggtgtagtagtatatgtttgtaattttagttatttgggaagttgaggtaggagaattgtttgaatttaggaggtggaggttgtagtgagttaagattgtgttattgtattttagtttgggtgattttgttttaaaaaaaaaaaagaggaaggtagagggagatttgattgtagagaaggaggaggttgtaggaggatggaggtagaggttggagggatgtagttgtaagttaaggaattttagtagagttttttatttaaagttggaagaggtaggaatggattttgttaatattttgattttagtttggtgagattgattggtttttgatttttagtattgtaaaggaaggagtttttgttgttttaagttattgagtttgtgataagtagttatagtggtaataggaagtgaatgtagtttttagtttatttttttgtttatagtaatataggtgtttttttgtgtagaattttgttaggtagttagtgagtgggataggatttttttttgtttttatttggggttttgtgttggattttttaaggttgttgtttttgagatagtgaattttttatatttatagagatttattttaaagttgagaaagtgttttttttaaggggtgttagaaagaaggttttaaggtgtttttgttatatgtttatttgtttgtgggtaatatttatagtttttttttgtgatttatttaatagaagggttataggggagggagtattattggttagtttattttatagtaaggttttattttggaagttataggggatagttgggatttttatttttaatttagttaattgggagaagagtttagaatagttttggaggttgatatttgttaggaagtgtggtgatatttatgtgttgttgaaatatatagtaatatagtagtagagaggaggggatgtggttttatagttttttttttatttatttagtatgtatgtatatatatatatatgtgtgtgtatatatgtattaatttttagtttttaggttttgtattttgtttttgttaagttttttggttattattaagttaggttgtgagtatagagtttagtttttttgttaatttttttttaatttattttgggtaatattttaatgggatgtagtagatgttttttattaaatgttaagagtaatatttttttttattttttgtgagttggtggttgtgtttttgtatgggggtgtggaggaaagggttggggagtaggaatgtggttttgagggttggtatgtatttgtagttgtgatgttttgaggtagtttatatttttatttatagattaattttgagaaggggttgggagtatttatagtttttgttatttttgggttggtaggttggggaaattttgagtagtttgagtgaaggttgtttttaggtaggtatggtgggatagaggggtttttgtatattttttgtgaggtagtgtagttgttgggttgttttagtatatttgggtgatatgttttttttttggtttttttttatttggtttgggagaatgtttaggatgttttaattttaaaaataagtaaattttttttttttgatttatttatttttttaaattgtgaattttttttttgtttgaatagtttaattttttaaagtaggtttatattatggtttttagttttttattgtttatttattttttagtttgagttatttggtgtttgtttgttttattattaatttagtttttgaaaaaatttttatggttagtatttagttttattttatttgattttgagggtagtgtttgatatgtattagttggtttttttttttttttttttttttttgtattttttagtgttggggtttagatagtttttaagggtttttttgttttttgatttagttttttggagtgattatatttttgttttagttttttagtttagttgtttttttatattttgttttaggttttttttttggaatattgtttgtttttagagatttaagtttttattttttatatttttttttttgatttttagtttttttattaaagttttattggttgtttttttttggtgttttaaattagtttttttttgtttagattttataaggttagtttttattttatgattgtttttttggattattgggattattttttattaatatttattttttattttgtttttttttgtttatgtagggttttgttggaggattttttttgttttattatttttttttttaaatagttttttaggtttttttgttaaagttgaaattttttttttgtatttgaggatttttgtaatttggttaatttatttttaagtttgaatttttatttttgtttaaggagtttatgttttttagttaggttttattgttttgtaaattttatttaaaattttttttggtaaatgttattatttttaggaagtttttttgatattttttattatatgtgatttttatttttagagttagattttgatttggagattttgatttttatttatttttgttttttttgagttttttaggttgtaggttttagtttatgtttgtgggtttttgtagtaggagggtttatttttatttttttaagaagtgtttgttttattttttgttaagttgtaattttttataagtaggtatttttaatatgtttttttatttttttttttttttttttttttttttgagatggagtttggttttgttgtttaggttggagtgtagtggtgtgattttagtttattgtaatttttattttttaggttttaagtgatttttttgttatagttttttttgtagttgggattataagtatgtgttgttatgttaagttaatttttttttgtatttttagtagagatagggttttattatgttggttaggttggttttaaatttttggtttgaagtgatttgttgattttagttttttaaagtgttgggattataggtgtgagttattgtatttagtttaatatgtttttttatattttttttgaaaagttattattatattaatagtgtgttttataaattgataataatttaaaatgtgatttattattaaaagtgtgattttatttttaaataatattgttggttgtggtttgtagttagttttattatttttgtgtgatgattattttgtagattagtaatggttttaggtttatatttaatttaattattttgtttttttaattttatttttttttgagttaatattaagtgtgttttagagttgtaaatttatggttgatataaaattaggatttttaatatttaatataaagtaattgggttttgtattggttttaatagtaattataaattatgtttgttttttgtattgggtatattgtatttagtttataatatgtgtttttgttttttttattttttttattaagatggtatataggtttaaatttgttttttgggagtaattgatttttttttggaagatgtgagtagtttttatattatatttaagaagatattgttataagattttatattttttattttagtttttaagggtttatttatttttttaaaaatttatttgttttgttataatatgtgtttttttttttttatttgtttttttaagatatagttttattttgttgtttagattggaatgtaatggtatgattttagtttattgtaatttttgttttgtgggtttaagtaatttttttgttttagttttttaagtagttgggattataggtgtgtattattatatttggttaatttttgtatttttagtagagatggggttttattatgttggttaggttggttttgaatttttgattttaggtgatttatttgttttggttttttgaagtgttgggattataggtgtgagttattgtatttggtttataatatgtgtttttatttttttttttttttttattaagatagtatatgggttttaagtttttttttttttttttttttttttaagattagttggttgggtgtagtggtttatgtttgtaattttattattttgggaggttgaggtaggtagattatgaggttaggagtttgagattagtttggttaatatagtgaaattttgtttttattaaaaatataaaaaattagttaggtgtggtggtgggtgtttgtaattttagttatttgggaggttgaggtaggggaattgtttgaatttgggaggtggaggttagagtgagttgagattgtgttattgtattttagtttaggtaatagtgtaagattttgatttaaaaaaaataaaataagtgggaagaggggagatagtggaataaggagtttaatttgtaattgattgtgaataattaattgagataatttattatttttggattagttatgggttttattttttatttgtttttttgagttatgttttttagtgaaattttatatgtatgtgattaaatttgtttttttttttattaatttattttgagtgagtttaatttatagatttttaaatattgaatttaagagggtagaggaaatgtattttttttttgttataaaaatattttatttttttattgtagtgttgtttgttttatttatagttggtaatttggattttgttttttaaagtttatgaaagtaggatagattgtttgtaggatgtttttgttataaaaggagggttaggtttggtaggaggaaagaaatggaagtggtaaatgtttattttttgtgttagatagaggtattaggtgtttattgttttggggagtaaatatttttaaaaatggaaagaaaaatttttagttttattggggtgtaaaaagttatgattttttttgtggttaaatggttgggtggtttgggagataagtggtagttattttgaagtttagtttatttgtttgtaaatggagggtaatgaaattatttgttgtatgggtgtttgataggttgttgtttaaattttttgtttttttttatggggttttggggaagattatatgagttagtaatataaaagtattttgaaaattatatgaagtgtttaagtatgggggtgttggttgattttaggtttgtttttataagttggtagaaaattttttagagagggttttgtttttttttttggggtaggggttgtagtgttagatttgatggtattggtggttgtttaggttatttggtatgagattgttgttagttttagatttattttaagtttgggagggaagtaggttggggtgggggttttgaaattttttatatttttggtagagatattagggtaggtaaaagtgttatttatggtaaattaagaagtttgtttgaattgggtttaaattagtttagtttagaatggaggttagttttattttttttttttagaattaggagtttagtatattagaggttgagaaaatgttggaatagtttttttatttgtttgtttagagatagggattttaagttatttttttttttagtttattttataaattttttgtgttagattttttttgtttaggagttataggttttatttgggagttatttagggttttaaggtttttattatttagttgtttattttattaggttaggtttgtaggtatggagattagtaggatgtggtttaaatttggttgtatgttgattagttgagtgattttgggtttattttttaatttttgggaggtaatgtttttttatttgtaaaaaggggaaagggtttagtgaggagagtgataagtaaaggagatggtatttgtgtagatggtattgtgtgggtgtttagtggatgattatgtgttatttttttgttttttttttttgtttttgtgggagtgtgggtagtagggagttaagaggaagggagtagttgtttgtttgggatgtaggttgttttgaattggaagagaaaaaggaataagtagtagttgtttattgataagttttatgtatttgtgttttaaaattttaaaggtgtatttgaaagattttttgggtaaatttttttttatagatatatgaaagttaggtgtagtggtttatgtttgtaattttaatattttgggaggtgaaggtaggtggattatttgaagttgggagtttgagattagtttggttaatttggtgaaattttatttttattaaaaatataaaaatttgttgggtgtggtggtgggtgtttataattttagttatttaggaggttgaggtaggagatttgtttgaatttgagaggtggaggttgtagtgagttaagattgtgttattgtattttagtttaggtgatggagtgagattttattttaaataaaaataaatttaaaaaaaaggtatatgaaaaaggtaaaatgttatgagtgttttgttgtaatgtgttagttataaatgggaattggaggattttttaagttatttttttttttattttttttttttttgtatatgtattaatagttttttgggtgttggtagtattaggggatttggggtgttttataggttttgtttgtttagattttagagttaaggaggagatataaaagttaaaatagggtggtaagtggaataaatggggattagatggggtaatttggtagtatttggtaaggttttttttaatgagtttttaaagaggtttagtttttaggggaaggaggtgttttaggtagtgggggtttgtagaggtgaaggtttagggtggggtttttagggaagttgtttaggatgtttgaaaggaggggagtaatttatgagtttggtgatagggttggttataaagtgttatgaagtattaattaggttgtttattagtttttaggatagaaagattatagtagttaaggtgtggggatttgtttatttgatttttatttagtttagaaaatgattgttttagggttataggtaatagtttaagttttgtaagttgttggttatagggtgtagttgtggtaaggtggggatgtttattagttaagttttttaggatttttgggttgttggatatgtttgtaggatgttatgggggtaggttagattaggggtatttttatttttttttttaggttttagtttttaggttagagtgttttttggtttttggggtttttagggttgtagatagatagggagaggtttgtgttatggtgggttatttggtttttgtaggaagtggttagaggttttagtatttggatatagtagttatttttttaatttttgttaatgttgttgttgtttggggtttattttttttaatttttttttttaattagggaggaaagtattttggagtaggaattgggttatttagtttgatattttagtatgattttgtatgattttgggttagttatttaatttttttgggtttttatttttttatttgtaaattaggtagataattttttaaagttttttttagttatagaattttaagtgttaaaataaaaaaaatttataaaaaggaaatatgtgtttagtttatatttttgtttttatttgttaaaaggggaaatggatttgttatggggttttttttttttaaatagatatgggagattttttttatgattgtagaattggagtagtttagaggagtttagaattttttagagtttgagatttataggggaatttattttaatttttttgggatagaagtattgttgtttaatggtatttaatttttattattgttgtagtaaatgattatatatttgtgatgttaaataatatagattagttttatattttattttattaggttatagggaaggtgtttatagggttgtgtatttttttgaggttgtaggggagattgtgtttttttgtattttttgtttatttgtattttttggtttgtggttttttttttttttttaagttttttttattgtattttttagatggtttattgtgtttttaaaaatttttgtgatgatagtgggtttgtgtggattatttaggattatttttttattttaagattagttgattagtgattttagttggttttgttatgttatttaatgtagttttaggtgttggggattaggatgtgtttaattttgggagttattattttgttaattttaagatataggttttggagggagatgaagggtaggattataggtttaggaggttgtttgtgtgggtttgaattttggttttattattaaggaattgggggagtatattatttgtaaaatgggggttggtggggaattagttttttggttgttagtgtagagtgaggtagtgtgtgtagtgtttggagtagttttgtgagtatttgttttttttttgttaaatttataagaattgattttggtttaatggtttttttaaatttttagttttttttggttataaggttaggagtatttttttgtagggttatttaagtttttagtttttttgaaagttttggtttatatgatgttggaagtagatgtgttgtgggttgtttatttatgtatggttattggagaggtttggatgatgttgtttttaatgggtgtatagtgtagggtagggttaggtattaataattagttatagttattagtgtaagtaaggggtttttattgttatttttggtttggggttagggagaagttttgggaggtatttgatttttttatagggagtggggttataggagaatgtatttgaaaggggttggggggtagtagaaagttttttttagaaattttatttttggtttgtgatagatgatttttttaggttattattggggtttatttgggtttttgtagtatggagtttggttattttagaaggatgattgggtaggttagggttattggtgatggtgatggtaggtttttttgaggtttttttattagaagtattaggaggttagagtagttgataagtttttatttggtttttgaggggtagaaggttttgagtagttttttgattttttgaggtttttttattttattgagagatttttgagagtattgagagttattttttggtttttttgtgagagagttggttatataaaggtagttatatatttagtaagatgaatttataatttttgagtttaggtttattttggtttttttatagggagtttttgggggtgtggggtgggggtgtagaagggaggggttggtgttttatttttgggaattaggttatgagttttggatttaggttaaattatagaggttttatttttttttaggttttttgttttttaattatttttgtatagggtattttttttttttttgtagggttttattggggtggggtgaggaggagttatagaattatagtagttgttatatgggggtgttaaggtagggatgttgatgttaattgaatgggtatgggaaggtagagtaggaggttggtgttttgggtttggttaggttgtgtgattttagggaatttattttattttttttggtttttagttttttttattgtaaattgagggagtgaggttaggtgatttgtataattgtgtgaatttgtgttttgtattttttatttattattttaaataatgtttttaaattttagttttttaatgttttggtatttttttgtttgagaaatatttatggttgttttttatgttgtgttttaaatataggtattttggtttttttttgggtgtttttattagggttagaatgggtagtttattttgtaggaatttttaaggatttttagttatttttaggatgggggttggttgtttggaagtggtttttgtttatttttgttgtagtttttattatgaggttagtgtagtaaaataggaggtgtaggtggttggggttaggggttaggttattttttttagtggggtaggagaggggtgagaaaagttggatattgattattttaggttgagggtttgtgtggaggagggggtttatggtaaaggaagtgggaggatgggaaggagtttttgttggatatttttattttgttggttttagttttgtttttgttttatttgtggggagaaagtgaggttttttgttttgttaaattttagtaatgaattttatatttattttattttttgtttattggaaattttttttttattttttggatttgttttgaatagttgggttgtagaagttggtggaatgaaatatgtagggtggtttagaggggattgtgttgaatagtgttgtgtttttgtttatttttttttttgaagataaggtttttttgtttttgttttttttttgggaaagttggagagggggttgaggaaatgggatttattattaatttttttgtgtatgttggtttttagtaggtatttttatattttttaattaggtttgtagggtggaaaggtagttgttgagtttaatttaatttttatttagttgtggaagttagtgtggatggtaaagtatttatgtataaatatatatatgaggttgaggttaagagaatatgtgtttagtttttttttggttttttagtaatgtttttatgttttagttttgttttaagttttaaatggtgtaaggtttttttaggtggaggaatggaagtttttaagaagtttgtgttttagggattatatagaggtagggtttaggagtaaaggtttttagattttgtagtgtggtgttggtaagtttgtgttgttgtatttatattgttttgggatgaaggtgatatgttgattttttttaggtggttgtaggatagttaggaggaggtgagatgttagttaaaggtagttatagataatagtattatggattattagaaatgttatttttgtgttaaagtgtttgttttttttagttgttttattttgtgttaatattttttgggagtgatatgtgtgagattgggttgtgttgatgagtgattattggtatttttagattatattaaggaggggttattttgttgttaattaggtgtagggtaggtggtattggggtatgatgatttgtttggtatggttgttttatttttttttttgtttgagtataggttggtaggtttagaggagaggaggaaatagagttattatggggggtgtgtttaggggtgagttattttaagaagttatagaattagggtatgggagatattgtttagttttgttattaatttgttgtgtgaagttggttaagttattgtatttttttgggttttaggttttgtaattagagggttggttgaagaggtaaatgatagtggttagggatgggggtattgaagttagattttttgtatttggattttttttttgttatgtttagagggaggtttgggtaggttatttaatatttttgggttgtgggttttttattggtgaaatgggaataataatagaattaattttatagtgttgttgggaggattaaaggggatatttattttaggtaaagagtttttaagatagtttggggtttttaggaagtttttgttattattattggatattattatttttgttatggttgttagggttttgtttagtattggtagtttgatgttggtagaggaagggtgaggtttttgtttttttgtagtgttttttttttttttttttttttagttatggtaataatagttgaagtttatttttagttttagtgattggttatttttttgaattaaggattgaaggttttaggtttgttatttaaggtttaggtgtaagaggggtgagttattggtttttgtttttattatatttaggtttttatatgtttttttaaataggtttttgttttatgtgtaagagaagatgttaatttttatgtttggggtgggggtgtttataaatgttttggatgtgagttttgatgggggttatggtgtaggttttgttagggtatttttaattataggggattatttgtagtttatagagggttttttgtaggttaatgggattttgttattttggttgttattttgtttagttatttggtaaggaaaataggttgtagatttagaggtagtatgggtttatatgttagtgagataatataataagggaaggatgtgtaggatgagggagttatggagattttattgtagttttagttatttattagtagattttgtgtggatgttgggtaggttattttattaatttttaggatgtttttgtaggttttgtgggtggatagggtgaatggaggtataaggagggtaagtttgataggggttggggttgggtttggagttagaattttagttagttttgttattgtattttagggtattttttgtagatagtaggttaaagtaaggttgtttagattaaaggggaaggggttttgttttttttattaagggttttttggagattttaatatagatttttagtttatagatattaaatttagggtttttgagaagtgagaaatgtgaaaaatgtatagaatagttgtagtttagtgtttttaatatgttagatttatataggtatatatagtgtttttgtagaggttagaaagttttgtgttgggaagttttttgattgggggaggttttatagtaagtttttttttttgtttatttattaatgggtggaaggttttaattaggattatatgggaagggttagtgggaggggtagagagggaaaatgaataggtaatattaagtgtttggggtggggggtgtaggggatatttaggaggggagggtaggggtgtattttttatttaatttatagggaatgggggtttgggaggtgtaggagaaggttttggtatttttatttttttttttttgtagatttatttatagtttgtttatgggtagttagatttagttataggttagatgtttgttttagttttatttttttggtttattgaaagtaagttaggatagtgagggggatgatgttgttatttttggtatggttatgttgggttttggggtgggtgggaatgtggttggggtgttattttttttggttgttataggtataaaagtttttttgtgttttagtgttatatgtgggttttttttttgttgttttaataggatggatatttaagtagattttgttggttggggggggtttttgtatttagttttattttgatttagtgaattttttttttgttttttggggtaggagttattaggttgggttttaggtaatggttagtgaaggggttgtatggaggggttttttaggtttataggaagggaggttttttttttttgtaatgtggttgtagtattttgtgattgagagggatattatggttggagatggtgggatggaggattttttatagtatttttgatgtttagaatattttattttgtataaaaaagttttaaatttttttgagggttgaagttatttagagttggggtttttgttttttaggttaaaagtattttgttggagtagttgagagtatagtgggaggggaggggtaggagggaatagttttgttatggtgataggggattttttgattttaagagggtttgtagatattattatttatttttagttttgaattgttttttgttaaggggttagaaatttttgggagggggattatagggggttttgtttatgagaatagtgattgtggttaggttatagtttataagttagtaattttgtttagttgttgtggtggtttttttttgatggtttttagaaaaagtgttttattttttgttattagtgttttgaaatttaagaatattttttaaatagtaattgtagtaaaagttaatgttgtgtgagtgttgtaggtattatttttagggttttatatattttttgtttagtttttataaaaattttattttatttttttttttgttttttttttttaatagtttagaaaatgagtatggaagggttaagttggtttgaggaggggttggtggaatagtttgagggtttagtttttaagaattttatattgtaaagggaatttttgggttagggagtagggtatagtttttatttttttatttttgtttttagtattaggtttgatatagatggggttttggttatgaataaatgaataagtgaatgagagtttgttgagggaagaaggtgatagggataagggagaaataaagtagttaatgttgttgtgatgatgatgatgttaatggtagtattgatatgtgggtttttgttatgttaggattgttttaagtattttgttttatgaatatttttgttttttattatgttttgagtggatatttttattagtttattttatagaggggaatatagttgagtgtattggttaaggttatgttgttaggaaaggttagagtttaggtagtatgtggttttttagttgggttttggtttatatggttttataggtagttttatgaaatatgtagagagagtatgtgaggggtttttttgttgttttttatttttagttggggtttattttttgttgaaatttttttaatttgtttttaagttttgttagttatgaaatatttttttgaatatttagtattatttttttatggttatttggttttatttttttatagggtaagttttgggtgaaaagtagaaaggatgaaaatttttgagagaggtgataatgtggtaatttttttttttttttttttttttttgagatagtattttatttttgttgtttaggttggaatgtagtggtatgattttggtttattgtaatttttattttttgggtttaagttatttttttgttttagttttttgaggagttgggagtataggtatgtgttattatattaggttaatttttgtgtttttttgtagagatggagttttgttatgttgtttaggttggttttaaatttgtgggtttaagtaatttgtttgttttagttttttgggattatagatgtgaattattgtgtttggttgaggtggtttttatataaagtagagaaaattatttttagtttaaaataaattaataagtattgagtgtttatgtagaaaaagattagaaggaaatgtgaatatgttaatagtgtttgtttggaggatgtaattattattgattattttttttatattttttaatttaattattttgttataagtaggtgtgatttttaaaattataaaagataaatgttggttttttgtttgtgttttgttttttgagatagggttttattttgttatttaggagttggagtatagtggtgtggttatagtttattgtagttttaaatttttaatttaagtaatttttttatttgagttttttgaggagttgggattataggtaagtgttattatttttagtatttttgttgtttagattggttttgaatgtttggttttaagtgatttttttattgtagttttttaaagttgggattataggtgtgagttattatgtttagtaaagattgttttttaattaggaagatagatgttttttagtattttttgtttttttttttttttttttttttgatatggagtattgttttgttgtttaggttggagtgtagtagtatagttttggtttattgtaatttttgttttttgggtttaagagatttttttgttttagtttttagagtagttgggattataagtgtgtattattatatttggttaatttttgtatttttagtagagatggggttttgttatgttgattagtttggttttgaatttttgattttaagggatttatttgttttggttttttaaagtgttgggattatatgtgtgagttattatttttggtttgttttttagtatttttaatttttgttttttggtattatttggttaagtagatgaaaagttttagtgagttgttagttggtattaggttggggttttttttaggtagttttaagtggttaggatttggttttttttttagagttgggtttagaaattaagattgggaatgtgtgatggttgttttgtgggtttttgttatgaggttatttttttggttttagtgattggttgttggttgtagggagtatgtgggtttagttagggtttgtgttaatatggttttgttttatttatggtttagtgggtttttttattttttgttgtatgataattttaggaaaaatgttaggagggagggagttgttgggggtgtgataggagagattttttagggatagatttgtaaaaattgttttaaagttttttttaaggatttttaaggtttttattgttttttattgataggttatggtttgggtagagaaagttggggatggagttggtggggggagggtggttagtatttgtaaggtaaggagatgagttgggagaataggggttgggagggtagttttaggttagtttttgtttttagaattattgttttttttttttggttataaagtgaggttggttagatataggtttattttataggttgggaggttgggtgtgaaagtattgtgtttgtatggggtattttatggtgaatattattagagttaatttttagggtttgttgttttatagggaagttagtgtaaggtgtttatggaatttagaagtatttaaaggatttgatagttatgagttgggaggatttagttttgtagtaggagaaagagaggtagagagataggttttgtaatatttgttttatttgttgtgttgttttgagtatagtttatttttttgtggttttgagttttagttttgaggtttttaagattttttgggtttttgtagtttaggatgtttatttgaaaattaggtttagttagtagggttttttttgttagtttattattggttagtttttgtttagtattttttagtttattatttttatttgtgtaaattttatattagtattttaagtttttttttttttaggaaggagattgtttttagatgtgttttttgtttttttttgattaaagtttagaaaataggaattagttttgtgttttttttttttattgaattgttggtttttttggatgttttttttgattttttgttaatatttttataatataattagtttttagtttttttttaaatgtaattggtgagtatgttgtagtttaggtggatggtgatgtttttattttgtaatttgtgagagttagtatattttttagttaggtgggttgtaggagttagttgtggtgagggtaggaggtttgtgtgttgatggtattggtattattaaaattatggttagattaaggttatggttaatgagtttttttatttgtaattttttttttattaaggtggttttagttttagttttggttttagttttggttttggttttaggagttgtagatatatttttaagtttttattttaggagtttggttttatatatattggaggatatggagttggggtataaatagttaagaataggtatatttgtaattaggagtagggggtggagggttgttgagatgtttttatttttattggttgttttttttgatggtttattatttattatatattgattgtataattagggttgtgatatgtttgttttttatattatattattaaatttttaaatttgtttttaatttatatatgatgaggtaaatttagagttaataatttgtttattagtttttgaatttatgggtggttttaatttttttttttttagtttttttgggtttatatgagtattgaggtataagggaattttattagttgggaagtgtgttttttttttgttgattttatagtttttttagtttgtgtttgaagttgttaatatttttttatttagtattgttttttgtagtttgagttgttgttgtgtgatttagggttagtgttttaatttttttggattatatttgtaagatgaggatgttgttgtatagtttattttaaatggttattaagttgtttgtatagttaatatttgttgagtttgtgatatgattagttttgttttaattttgaatgtggtatttttatttagtttgggggtggaattgttagtttttttttttttggataaggaagttgaaaggttttagaaggtattaaggttagttgatttgttagtaggtatagtgtttatttgttatttatagtttttttttgattgttttgtttgtttttttagttgagattttgtgtgtatttgaatattttgttaatggttgaatttgtattagggttattgtgttagttgggtttgttaggttattgtttttgagttttgtttaaggtagggttagtgtttatattttgtttttttgttagtgttttatttaaggttttggaaaggttttggagttagagatttggttaaattttggtaatgttttatatttgttgtgtgattatgggttagtgatttagtttttttgtgttttttgggttgttgtgagggttataggagatgtatagagggttttgagtttggtggttggtatgttgtaaaggttagttatgtggtgtaaggatggtattgatgataataaatgaattgaatgaaaattaggttaattgggtttggggaggggtgttggttaaatagatttgagtggattaggattttgtatatgatgagtaagtgggaatagttttaaatagtaagttgggtaggtttaggatgatttagttttgggtgttgtttagggtttttttttggtttttttgttggtttggtttttttttgttttagtttgattgtttttatgggttttaataagtttttgattaggattgaggtagaatagatagggtttaagattttgtaggtaggtatagagtgtggatggtaaaaggagatgttttaggttttttgttgtttttttttttttgaaggttgataatgttaatttatagaagaagttgttttttttggttttggattttattttaatatagtgtatgaggtagttgtgtttaaggggtgtgattatttttgtagatggaatttatttattgtgtttagtttattgttagagtttggaggatgggggaagtgaggtggggtattttttatagtgaagggaaaatttagtttagttatttttttttgtgttgtttttggaatttattttgttatggttttattttaatttagttttttaaagttttagagagttttgtttttttttttgtattttattttgtttatttgtgttgggttagttttttagaagttttgttttttgttatttttagggtattaaggttggttggtgggtttagggatttttattttttgatttagttttagtggtttattttatatttattggtatttataggtgtgttttttatttttggtttttgtataggtggttttatattttgggagtttagttttttttaaggatttatgttagagtatagggatttttgtttttgatttttttttagttttaattatgagtagtttatgttatagtaattttttagttgtttgtagttgtttgttaagttatgataatggtttttgttttttaatttaatgtttgtatatagataaattgttatattttaagtagattagatattattttttttaggaagttttttttgattgttttagttggatagaggttttttttttttgtgtttttttaatgtttaataggtatttattgagtatttgtgatatgtaaggtatttataatataagttagtgttttttgtttttttagagggtatatgaataaataaatggtaagattttttaatatttatttatgttttatagaaagttatttataggtatgggagggttgttttaattgtgggtgatagggaggtttttttaagatggtagtgttttagtaagatttgaatgaggtggttaggaggtttagggagggattttttaggagggaataagtgaatatttttttgtgaggatgagtttttatgttttaggagtagttaggttaggggattggtgtagtgaataggggttgaggggagtggttaggtgatgtagggttttataggttgttttatgatgagttagtgttttaagtatagtagatatttagggaaggtttaggttggggagtgatttgaatagattttttatttaggagtttattggggtttttgggtttatgttgttgtgttattgtatgtttttgggggtttgggggggtattttttatattattattataggtagtatttttgggggaggtgtgttgtgtaggggatttgttggttattttgttgggtaaattataggggattgtgtaggataggtggttagtttaggagggataattatttaagtaggggttagagggtatttggatttgggaggagtgtttaattttttaggtttaggtaattagaggtggggggtggggtgttgttttttgatatgggaggtttgggggtttggttgtattttttggtgtggaggtgttgggaggtgtggaggtttttttttgaggttgggattttttggttattttgatttattgttttgattttattttttagtttgagggtatggtttgaatttatagttgtatatatttttttttgtatagggttttgtggggttggtatagtagttttttttttatagattaggatgtttagttttaggagggttgggattgtttaagattgtataattagggttagatatagttgggttaattttgtgatttttggttttatgtatagattttaagtatataggtaaaattttgttggttgggagggttggggggtagatgagtggggggtagtttttttttagttttttaatatgttaggtttttgggtgggagggggtataaagattttattttttttaagagatagagaaagaggtagtggagggtttttttttggttgaggttttaggttttgagtggtgaatgtaattttatttggaggttggaagttaggtggttttgggggtgtgtgaggtttgttagtttagttgtagttttttttatgtaagggaattttttttaggtagtgtttttatgattagagagggggttaggaagaggtgagggttgtatttagagtgatatttgggtgggttttattttggggatatggttatattttttttttggatttttgaagtttttaggtgtgggttaagggtttttagttgtaggtaggagagggttttatagttatagatttggggagtttagtttgtaaagtttagaggtttttggaggttgttggtttggttttttgtgtagttgggtttttttgggaggtttttttttggtatttttagtttttagtttgtatgattttttatagttgggtttatttttttaggtttgggttatatggtgtaggttagtggggttttgggggagggtagggtgttaggaatagttttgggggtggggggattggagtagagtttattttggttgtttgtttattttgtatgaaggatgttagatttttatatgtggttatttgattttgtttaattatgtgtaagttttggttatttttattttattgatgggaattaaattggttaaggagaagtttagaatttgagtagagtaggggtttaagttttttaggagttttaggtattttttagtttttttttttgagtattgagtttatatatttagtgtttggatgtttatttatttgggggtttggtgattgttagttagtatggtttataaagggtttttgtgtaataggttttatttgatttttttaaaaattttttgaggtaggataatgttatttaatttattttatagataaagtaattgagttataaaatggtttgttaaaagatatagaggtagaaagattaatagtaaagagtttttttgtgattttgattagtaaggtttttagaaaaaagtaagggattttgaggtttttataggaatagagttttggaggagaataagagtttagttttatgttatttttaaggggtattttgaaggttaaggtattgggtttaagtaggttggattgtgttttttgtattttttttattttttgaagtttttttttttttatttaggtgggttgtggaggtgtttataatatataatggaatagttggtaggttattgggttttttattgagttaaggggtttgattagaggtttaaatagtggtatagaaattatgagttttgttgtaaattagtttaggttttggagttaagtagttttgtgtttatagttagggttagttgtttttagttgtgtggtttgaggttagttttttaatttttttgtgttttggtgttttttttgtagtagtaataggaattgttttttatggtgatagtgtagatatattttatgaagtgtataaagttttgagtttagtgtttggagtatgttaggatgtagtaagtggttatttatgatttatgaaatattaataaggtgaggggtggaatgatagtttttttgtgttgtttttaaaatggaaataaatttgtttagtgtttaaagtagtagaaagtgagttaaggataggtttttagtgatatgttttggtagagtgttttttgttggttttaggtagggtttagggtgggtggttattttttagatgagtttattgttggtatttgtttttagagtatatgtttggattttttagatttttttttttttttttttgatttttttttattttgtaatttttattttttgttatttttttatttattttttttttttatttttgtttaaaaataaataatggaggttaaatgtgttagttggttttttggaaaggtttttttgtagtaggaatgtgatgggggtagtggaggattgtttagtgtaagttatgtgatttttgtgtggagttggggaaggggaggtgttgagattgagggtgttaggattgaggtattgagatggggttattggataatggttagggttagtttttgtttttattttaataggggtttttatatttaggggttatatttttaaagttttttggataagagagataaattttattatagggttagaaatgttgtttttaggttgttatttgggtgggggtgagagatgttttgttggtttttaaatatttattttgtggataaaattattaaggggaatttaatgtttttatagtagtttggttaagatataggtattaggttgggtgtagtggtttatgtttgtagttttagtattttgggaggttgaggtgggtggattgtttgaggttaggagtttgagattagtttggttaatatggtgaaattttatttttattaaaaatataaaaattagttaggtgtggtggtgtgagtttgtagttttagttatttaggaggttgagataggagaattgtttgaattttggaggtggaggttgttatgagtggatattatattattgtattttagtttggatgatagagtgagtaagatagttttaagaaaaaaaaagatgtaggtattgttttagggtttataagtataatttgatttttgatgttggtatttaattttgatgtagattttagtaggaaaagggagatgaattagaaggttgtggggatgaggggtttatagtagtgtttattagatttgttttggtaggtataagtgttttttggaggttgttagataagtagagggtttattttagagattttggttttggagggttgggttagggtttaggaagttgtattttggtagggaatttagagttattttgagttttattttggaagtaagagttagggggtagaatagaattggaattaaaagtttttgtgggtttagttttatggggatgggtttggttttatggggatggatttttgtattatttgaggtgattattagtttggttttttgggattagttttgagtgttttttggggaaagtgggatttgtagaggatggttttttaggatttgtttgattatttatttttagtttgtttttattttagtttttttgatttttattttttatttagaattttggagatttggttttggaggtttagagattagaaatgaggggagataaggggagaagtttttttttttatttgttggttatgttaatgggttgattttttaggaagttatattagttattgttattgttttggttgttttgtttggttttgaggttgggtgagtaagtattttgttttgtttgtttttttatttgagttttttgttgatgttatgagaggtttgattatgtgtttaggaggtataggatagagtttagagttgtttaagaatatataaggttgaggtttgggttttgtatttgggaagggttaggaagggttaaaggaaaattttagttgagtataatggtttatgtttggaattttagtattttggtaggttaaggtaggaggattatttaagtttaggagttggagtttagtttgggaaatatagtaagattttatttttataaaaaaaaattaaaattaaaaaattaattaggtatggtggtatatatttgtagttttagttatttggtaggttgagatgggaggattgttgagtttaggaggttgagattatagtgagtgggatattgggttattgaattttagtttgggtgatagagagagattgttttaaaaaaaatttttatattttatggagtttagtagaatttttggttagggtgttttgattgtgaaatgagtgtggtagttgttaatttttgagggtgaagatttatttattagtaatttgtattttggtatggtgagaggaagtgtttggggaaagatgttggttgaggtagagagtttagtttaatttattgtggaggagttattttagttttaaagagaaagattaataaattttaggtgaatggtttaaaagttatttttgtatatgtagagggtgtattttgggatatgtggatatttttttttaggataggaagtaaaattagtaggtagagatgtgagtttttttgtttttgttggagttaatttggagtttttattttggtttttagggaagtatagatttttatttttattgtagttaaaagattttttgttgatttttttagtagtatttagtttagttttgtggggagaggtggtagggggaggagatagagaaagatgagtttttggtagttgtgattggggggagagaaatgtggttttaatttgtttttgtttattttatagatgggtggtgttttattttaaaatttagggtagttgagggattgaaggaagagggggatattttttaattggggtttttttttattttattttatggtgttttatataggaaagagttggaaggttttgggtttttggtatttagttaaagttttaggtaggggtttagatattgggttgtgttattattttaggtagtttgggagttagtgatggtagagttttatttttattttgattattgtatagtattttgtttttaggatagtttagtagttaggttgttttagggtttaaatttagatatttaattgtgggggttttaggtaagtggttgaagttttttgtgttttgattttttaatttggaaaatgggatgatgaaagtaattgttgggtagggtaaggggtaagtgaaagttagtgtttgagagtgatgtggttaggattgttgttgtgattatatattgagttttttttttttatttgagataagggttttattgattgttgttagaaagatttagatttagaaggattaggaaagttgttttatttataattttagagggaaggggaggtttttgtgttagttggttgttgtaggggagagggtgggagatagatgggggatagaggagtaggggtagtaggaggaatggttggtagggaagtttgtttgagatttaaaggattgtttattaggaggatagtttaggttttttttattgagaaagatttttttggatagttgggttgaggatttttaggttttttgggtggagtagaattagttattattgaagttatataggtttgtaagtataagtgggggattgtttaggtatttttgttttataggggttaggtattaaggttagggtggttagaggatatgatgtagtttagtaggggttttgtagaattattagttaagaagatatatgtagaagtatgtaagtgttttgaggaggtaaattttttgttggattgaatatggggagttgagtttttaattattgagttgggttgtttggtttgtttttttttttttgaatagaaggtttttagatagagtagttaggtaatagtatggttaagtaggggtttgtattttagttttgttttgtagtttgattaggttgttgtttttttaggagatatgggattggttagggtttttttaggttgttataggaataaggtagggttgtgattttttttatggtttaggtatttgggggagggattatgagttttagtttaggggatagataggaaatggatagtttgttttttttttaattatggagttggttttttttttattgtattttttttagttatgttttttattagaagattattgtatttaatgggtggttttgtagtgatatttagtttaatgaagttatttggtgggggttttgggggatgtagttttttgaaatatatatgggtagtgggtgagttggaggttgtgtggggttttgttttttggggatggttaggaggtgttttaattatttgtaatttgagtttatagtgattgggatttgttgtttttttattttagtttttttttattagtatttgttaagtgttagttagtaggtgttggtatggtttaaggtaggtttgtagttagattagtattgggggagggattgggagagagatttttagagtggaagttatagttttttttttttttaggttgggtaatagattattatttttagttagttttggggaagggggaggggttagttgggttgtaggtatagtgttggggttttttgaggtggttgttgttgattatggttttttttttttttgggttgggtaatagattattatttttggtttattttagggaagtgggaggggttagttggggtataggtatagtgttggggtttttgtggtggttgttgttgattatgggtttgttattttttttttagttgggttgttattttggttttgaaagtgttttttttagtttttaatttgtgtttaggaggtagttgatattttaagtgttgttatagtaggaggttgggtttgtaagtgtgatttgtttggggaggggtagagggaaagattatttttgtttaaatagtggttttttttttttttttgggggtttttatagggtttttagtttttttttggttaagaggtaaggagaggtaggaaagttttaggaatattggtagagaagagatagggtaggttgttagaggaagtaggttgtagggtgtttaaggttttaggttgggttttgggaggttagggtatgggtaattaggaggtttaggtagggaaatttgttttgtagggattttgggagataggggagaggggatatgatagttgttttttgttgttttttggttgtggtttttaggggttttagtttagattagaagtattttatgtattgggttttggtttagtttggaagtatggtttatagatttatatgattatttgggtagtgatttttaaaaggttttttgttattagttggggagtttttgaggggagggtggttttgtagagtatttggagatattaatgggttgtgaggaaaggaggaggtgtggatatttttatggttttaagagaaaattaaggtagagttggaggttgggtgtggtggtttatatttgtaattttagtattttgggaagttgaggtgggtagattatttgaggttaggagtttaagattagtttggttaatatggtgaaaattggtttttgttaaaaatataaaaattagtttgttatggtgatatgtgtttgtagttttagttatttaggaggttgaggtaggagaattgtttgaatttaggaggtggagattgtagtgagttaagatggtattattgtattttagtttgggtaatagagtaaaattttattttaagaaaaaaaaagagtagagttggaggttaggtggtttttagagtttgataaggaggttgtggggttgggttgtttttttggttatttgaggggtagggattggtttagtttgagttttagatttataagaggttgaattggagtgggattttgagatgaggtagggttattttgtttatatttgtgtttaggttttaatagttattttttttaggaatttagtttgatggttttttaggttgagaggttgttaaggggttgtaaggtgttgtaatgtgtgagttggtgggttttgatgtgtgatagtttggggtattttttttattgttagggaataggaatgaggagttttttatttttagtgtttggtaggtaggaggttgttattggattgtgtgtttaggtgttattagattttgagggtttatggatatggtatatgatttttaatgattaatgtttgtgtagtaggtgttgaggtgttttaattttgagtaaggttgggtttttggaattttttttttggtaggaggatttgtagttgaggaatttttaagaaattttttggtagtaaataaagtatggggttggatggtggatttatgagtgtttttatatgaatgtggatatagatagaaaagatggtaaatatttgtgaataaaaggaatggtttttgtgtattgaatttttatttattggtttttgtttggtataaagtttttaggaattttttaatagttttagttagaaatgtgtttttgtttggttatgtggaaaattttatatatattaagatatatgatgtttttggttttttttatgaatgttttatgttttttgggtttatgatttggaatttgtagatttttgttgtttttgttttagagttataaggattttggatgtaggaaatattttttatgtgtaagggttttttttttttttgttagggtttattggtttttttttgtttataggtgttatttaaatttttgtatttgtggttttttttttttaattattttgtgtaatttgttaatagtttttttatttttagagtttggttgttggagatatataaggtatatagaatttgtgaaatgatattgagtatttattaggtatttattgtgtgttttgtttggtaataataagtaaaattataatgttttgggtatatgagtatatttttttatgtttatttttttagtaatttaatgagatggttttataaatggggaaattgaggatagggaggttagattggtttaaagttataggttaggaggggtagggttaaaatttaaatttagatagtttggtattaaattttagttttttatatgaaaggtattttgtaattttttgagaaggttgggattattatttttattgtatagatgaggaaattaagatgttaaatggttagatagttttggagttaggaggtgggtttagtggtttatgggagtatatggaatggagtttatgggaggtttgaggttgggattttgtattttattttggtttaagggatgaggtgattgggagtgttagagatattttgggattggttatttaggtgttttgtatttagttttagtgttgagtgggtgagggtggataatttgttatttagtagggttgttgtttgtattttggtggttttttaaagtttggttaagtaaagtaagattgtttttggattagagtgatttttaagttatataagtatttagttatgttttggaggatgtaggattgggaaggttttttttttattgtatttttatttagtttttttatggggtagttggttttaggtatagattagatgtttttttttttgtttgttgttggtatgtttttggttttattgttgttttagggaggggtttaagagttttttggttttgttatttattatattttgtttagagggttgggggtttagtattaatgttaagtatttagtagtaaaattatgggttggaaagagttatagtgttgttttgatttggttttattttatattgggtgttgtttttattagtttttttttgtttttggttttattttttaggtattataagttttgtaggtttaaagttaaatttattagtttttgattttttttagttgggattagggtgaggtttttgtttaggtgtaaaagttaaggtagtgttaaaaaatttaggaattaaataatattttgaagtaatattttaaataaattaaattttatgttgaataaattttgatagggttgtgtatgtgtagggttgggtttgttttaatttaaaattttaatatttgtttattatagagattattatgtattattttgatattgaaaaatattgtattaaatattatttgtgttgatttttgagttttttggtgtttttttatattttgtttttgataagtgtttgatatattttgttttagttggttttgttttttaggtgtttttttggggttgttttgtttatgttttttgtagttattaggagttattgagttattgtatttgttttattttgttttttatgtttttgtattgtttattttgttatgttttttttgtgtgttttggttgtatgttagttttagataggagtttggtgggttgggagtttatattaatgttgtttttttttggttttggtgttgggtatagggtagtattggagatttttttttttttttttttttttttttttttgagatatagttttattttgttatttaggttggagtgtagtggtgtaattttggtttattgtaatttttattttttaggtttaagttttgttttttggaattaagtagatttttttgttttagtttattgagtagttgggattataggtatatgttattatatttagttaatttttatatttttagtagagatggggttttgttatgttggttaggttggttttgaatttttgattttaggtgatttgtttgttttaattttttaaagtgttgggattataggtgtgaggtattatgtttggttgagattttttgaataaataaatattattggtatggagatttgtttagggaatttgtttagattttgttattgtatttttgtttgttgtgtttagaggtaatttagggttgttttagttgtttttatttggttattttttggtttttatttaggttggtttgttttattttgtgggttaagaaaatgatttagtgggtggtgattagtattttttttttaatttgaaaagaatatatttattagtggtggtagtaatttaatgttttttagttgatgaaggtaatatgtttgtttataatggaatggtttatgttatggtggaatattatttagggatgtattggtatttgttataatgtggatggattttggaaatatgatattaagtggagaagttagatataaaggttaaatgtgtaattttttgtataagaaatgtttagaattggttaggtgtagtagtttatgtttgtaattttagaattttgggaggttaaggtaggaggattatttgagtttaggagtttaagattagtttgggtaatatggtgaaattttatttttataaaaaatataaaaattagttgggtatggtggtataggtttgtagttttagttatttgggaggttatggtgggaggatggtttgagtttgggaggtggaggttgtagtgagtagagattgagttattgtattttagtttgggtgatagagtgagattttattttaaaaaaaaaaaaaaaaaaaaaaagaatttatatagataggaaggaaatatggaggaggagggtaggattgatagttaaaggttatggggtttttttttaagaaaaaaattttttaaattttttaaatttttaattttttaaaattggttgtggtgatgatggttgtattattttttgaatagattgaaaattatggaattatgtattttaaatgggtggattgggttatgtggtgatttatgtttgtaattttagtattttgggaggttgaggtgggtggattatttgaggttaggagtttgagattagttttaatatggagaaattttgtttttattaaaaatataaaattagttgggtgtagtggtatatgtttgtaattttagttatttgggaggttgaggtaggagaattggttgaatttaggaggtggaggttgtagttagttgagatggtgttattgtattttagtttaggtgataagagtgaaattttgttttaaaaaaataaataaataaataaattggtggattgtatagtagtttatttggattttaataaagttgtttaaaaaaaaatgaaaaaaagttttttttttttttaaaataaataaataaaaagaaaaaaagagagaggggaaaaaaaaaaaaaaaaagaaaatattgagtgtagtatatgtatggtaaaggtaagaattttattatggaaatttggttttattaatatattttatttttatttttattttatatataggtgtgttttggtttgtggtgttaattgtatgtttttttggaggttgtagtttagattggttttgaaagttgttttttgggtaattttaaattttttataatttttgaagtttttggtttgttgggattatttagttttttagatttagttttgttattatttatttaagattgtagttttggggaggggggtttttttttaagggtgtaggggttttgtggttttatttttttttagaatatatattattttgtattgtatatatgtgttttaatatggagtattttaggatgttggttatagttagttatgtttgtatattgattgattgattgtgttttgttgattaattatgttaattattgtgttgtatattgtttttattaagtgagttaaagtaatttttttggaataagttgatggattttaaataagttaaaagatatttttttaggaaaaaaatagtaatgaattttaagaagaaagaaaaatttttaaatttatagatttatggaaaaagtttaagtttttaaagtgttagatttttttaaaagtattaggtttagatggttttatgagtgaatttttgaaaagttttaatagagagattattatgttgttgtttaaaatgttttagaaggtagagggtaaaagaaatgtatttaaattgtttttgttaagttagtataatgtagatattaaaattgataaaaatagtatatatatatatatatatatatatatatatatatgttttatttgttttagattaagtttgttgttgtgtatttaagtaatattatttatttttattttgttgttgaaattaaaatatattttaatggatttatgattttaatatgtaaaaatgaaattatagaagtattagaagaaaatgtgggtgaaatttttttttataattttagaatgtaggagatttttaaataggatgtgaattttaaaagttaaaagggaaagtagagatttgataatattaggattaaaatgttttgtgtagaagaatattttagaaataaaattaaaagtaggtagttggggataagatatttgtatttgttgtgataaagatgtataaataatttttttttttttttagataggattttattttgttatttaggttggagtgtagtggtatgattatagtttatagtagttttaaatttttagatttaaatgatttttttatattagttttttgagtagttgggattataggtgtattattttatttagttaatttttgtagagatgtggttttgttatgttgtttaggttggttttgaatttttaagtttaagtaatttgtttattttagttttttaaagtgttgggattataggtgttagttattatgtttggtttataaagaattttttttaaaaaattttaataagaaaaggatatattttttaaatgaaaagagaatatagggttttggtttataatatatgaagagataattttttttgtttgattgagatgtataaaataaaatattaattggagagtatttggtttttagttaggggtaaggggtataggatttttttgttggattattattgtatagggtttagtagatagttgagtaggttgatgaggggaggggttttaaaaaattttagtaattattttagaggttaatttaggaataaggattaattttttttttttttttttttttttgatagggagttttgttttgttatttaggttggagtgtaatggtatgattttggtttattgtaatttttgtttgttgggtttaagtaagttttttgttttagttttttgagtaattgggattataggtataagttattatgtttagttaatttttgtatttttagtagagatggggttttattatgttggttaggttggttttgaatttttgattttaagtgattagtttgttttggttttttaaagtgttgggattataggtgtgagttattgtgtttagtagattaaaatttaaatgtatatatttttgatatagaaatttattaagagtttattttttagttatgtgtgtatatgtataagtgtgagaatatttgttgtagttttttaattatagtgggaagttggataagtttggtagggttatgggatagttgatgatataattattaaaaggaatgtgttattttgggaggttgaggtgggtggattttaaggttaggagtttaagagtagtttggttaatatggtgaaattttgtttttattaaaaatataaaaattagttaggtgtggtggtaagtatttgtgattttagttatttgggaggttgaggtaggagaattgtttgaaagtggaaggtgaaaggtggaggttatagtgagttatagtgagttgagattgtattattgtattttagtttgggttatgttttgttaaaaaaaaaaaaaaagaaaaagaaaaaggaatgtgttatatttataagtggtaatagtgttgttaaatggaaaaaataaaagttggtagtagaagtttgattttttttgtgtttttgaaaagtttatatttatatattgattttttttatataagttttgaatgattttgtaggaataaaatttaggagaatgttatatttagttgttaatatggttattttttgggagagagttggggaatgggagagaaaaatttttttttaaattttatgtgatttttattttttatttaagaatgattgggtattgttttttttttttttttttagatgggagttttgttttgttgtttaggttggattgtattggtataattttagtttattgtaatttttgttttttgggtttaagtgatttttttgttttagttttttaagtagttgggattataggtgtttgttattatgttttgttgtgtattgttttttaggatgaagaaagggaaaggttatagggagaatgggagttagaatatagagtagggtttttaaatattagtttgtgggtgagagagatatggggtgatattattggtttggaatttagggatggtatgaggtgttgtttaggggttttagataaggtttgtttgttgattaagtaagggttgtgttggtttttgtttatgtgtttgtttaatatgaattttttaggtgttttattttgttttatgaattattattgtttattttaattatgttgtataggaagaattgtgtttatttttataatgagaaaatggattagagaggaaagttattaggtagggtaggggtggtagtttaggtagtgtgagggtaaagttggtgtttttttgttatttttttatatatgagtgggtaaggtattataggagtttatattttaatttttgtgggttattttggaaggtggtagatggaattagtgatttttagggttatttttagttttaggttttagataggggttgtggagtggaattgagtttgatttaggtgtgttgatggtagttatgtaattgtggataaattatttttttttttatttgtattggatgagattgggaatttttattttgggttttttaagagttttggggttttatagagtatatttagtagtagtagtgggatggggggatagggttaggggagttttatgttttttttaattttaattagagtatttttattttaatttttttttgggtttagtgtttagagagaatgggaaggaagtttagttttggttatgggttattttagtttgttagttatagtttatattttaggagttttttttggattgaaggagatagagttatttataatatttatagaaaattttggagaggaagtggagtttaattgaggaagtgtttttttgtagtttttagaaatgaggttataggtgagatagtgtgttagggtggattatatggtatttttttaggttgtttgttggaatttagggtttggttaggggttgtttatattttgggttttgaggtggggagtttgagtgtgtttttttagggttgaatgtgttttttgtttatattgtatagagtatggttgtttggttgtggtgtgtttttttggataggtttgttattgtgtagatttttaattttggtagttgttttgggtttgggaggtggtgggtatagatatagttttttttttttttggtagttgttttgattttttgggataagtgttgagaggtggttttatttagtgttatgtgtttgggggttggggttttattttggggttaggttgggtggttagggttatagagttgtagggggtggagtagagaaattgtttttagtgtttgttttttggttttatttttttttgtagttgtgttttatttaaggtattttatagttgtttggtatttgttgtatttttggattagtttttttttttttttattattgtatggtgtttggtaggttggtgaggggaggggttttttttttgggttttggagttaggttttgttttttggttttattttgttttattatgaaggagatatattgggtttggttaatttttttgtattgatttttgtttttttagtatatgtgggattttttattttagatttaggtttgagaggttttagggatagtttggagaaggagggtatttgtttttagaaggggaaagagaaagagatttaattttaaagtaaaaggggatttgggtgttttttgtaagtagtttaggaaaatgggaggaggtgggagtagtgggattttttgagtaaggtattttggtaggaatgttagtgttttttggatatttttagaagtagaagtatatagttttatagaaaaattttgtaggtttaggatttgaggtatgatatgatttaaatttattgttttattagatattagtgagttttttgatgtttattaaggttttttgttttatatttggtattggatgaatttgtatattttgttttagggagtttatagtttagggataggtttagagtttatgtggggtgttttgtaaatatggggttagaagttgggttgtttatggggttttttttttttaaattatagtggttattttttttttaattttatagtttttgatttttattaggaatttttggggtttagtaggtgttttttttttgtaggttgatgtttgttttttttattttttatttaggtttagttttgattttattttttttaaagttatttttttattgttttgtgttgggtggttttagggagttttgtgttttgattaattttatatttaatgttgtattggtagttttgttgtttgtgttgagatttttttttgttttgtttttggaatatatggtttggtgtggattaagtatgtgaagagttatgtttattattattagtttgggggggtttgattttttgtttttttaatgttttatttatatgataaagatttttagattttttgggttataggaaaattattgagatatgttgttatgtttattttgttttaattttatatttatgtttataagtggttttagaattattgtggattttttttttggtttttggggtgggtggatatatgagagtttagtttttagttatttttgtagatgtttttttgatagattaagaaattgaggttgggaggggtggaatgatagtttagaattagttgatttatggggtagagttgggatatgtttagaattgagttgggtattgggtttggttttttttttgtttttagtgagtattttaagaaggtagagaattagatttatgaatgagtgttgagtatttgttttataaggtagttttggagaaatttggttggtgtggttgaggagttggaggggggtaattttggtggggggggttttgagttagtagttagtttttgtaggtttagtattgggtgttgtagtttagttttattttattttatttagaggtatttatgttggggggtaggaaaagagtagggatttaggagaggaggtaaggttgtttttatttagagtttgagaggattagggatgattttaaaggatgagtgtttttttgtgggaggatagtaaggagggtgttaagtttaggggtagggttagagttttggaaattgagaatttattttattagtataaagtttagattttattaggttttggggtggaggagtaggtagggatgtttttgttttttgtagtgttttttttttttttttttttttttaattatttaggtgtttatatttttttttgaaatgttgattttttttagaatttttatattgaagttaatatttatttattgagttttttagtataatttttagaggagagattaggtgttttgggggtaaagttgattaggaaagtttttgtttggtttttagggatgatttatgggggttattatatttgtttataagaattataaaaaagttattttaatttattattagtggtttatttttttagtataattttatggtatatttattatgtttaagttatttatttggtattttatgggattttttttttttttttttttttttttgagatagggttttattttgttttttaggttggagtgtagtggtataattttagtttattgtagttttaattttttatgtttaggtggtttttttattttaatttttttagtagttgggattataagtgtatgttattatgtttggttaattttttgtattttttgtaaagatagggtttttttatgttgtttaggttagttttaaatttttgggtttaagtaatttgtttgttttggtttttaaagtgttggatttataggtatgagttattgtatttggttttttatgggattttttataaaaattaagataggttgggtatggtggtatgattttagtattttgggaggttagggaagttgaggtgggtgggttatgaggttaggagtttgagattagtttggtttatatggtgaaattttgtttttattaaaaatataaaagttagttaggtgtggtagtttatgtttatagttttagttatttgggaggttgaggtagaagaattgtttgaatttgggaggtagaggttgtagtaagttgagattatgttattgtattttagtttgggtgatagagagagattttattttaaaaaataaaaaataaaaaaaaaatataaaaaaaaataaagataatagttttatttttagaatttagtgggggtatgaaaggaattttgaagattatatagtaaaattttaagtatggatattgttggtttataggtgaattttaggtttttttttatttttgtattttttgtattttaaagaaagggtatttgattattttttatgatttgaaaaattatttttatatttaaaaaaaaaagtttagtagaggaaagaaagtttatatataaattatttatattttaagttaaatatgaggtatttggattaggttttgagggatgtataggagtttattaaggtagtgatgtaaagagaagtagaggttagggtttaggaggttagggtaaaggggttgtgaggaaaggtgtgagagattaagggaagattaaagtaggagaagttgggaaggagagaggtgtgagttgagtaggagagtgaattaattgtggaggggtttatggtgagtgagtagagaaggtttagtatgggaagagattttagtagtgttgtgttttggggaagttagtttgggagtaatttagttggggttttaggagattttgttttgtatttatagttttggggtggagataaattatagtatagatgtttttttgtaggtagaagttaaggggttgggtgtttgtttagagggtatggaattttttttatgatttttttttttatggtgttagttggatttttggtgtttgggggatagaggggttgtagagattggttagagttgtgtatgttggggtttagggaatttttagtttagttttatatggaggggtagaaggggatgggtttgaaggaaagatgggtaggaagttgagttggagagaattggatttgtgtttagaatggttgtgatatagagagggaggatggagaagtaagtaggtggtgttttggaggaagaattagtggggtttaggtttgggttttttgagaagttatttttattggattttaagagtatttttttattgggaaggttttgtttttgtttgtttttgtattttttttatttggatttgtttaggtttttaggattgttagtttagtttatggatttttttatgtgagttggatttttatttgtataggtttttgtttgtgggtggttgggtttgggatgttgatggtttttttttatgttttggttttaatgtgtatattttattttatggagaaagttattgtttttttagagtgttaggtttttggtagttttgaatgttgttgtttttatgtggtttgttttttttttttttttttggtttgatgaaattgtatttttattgttggggaagttttttggatattttttgtgttttagttattttgtttatggtttggtgagttttagaaagtagagtttgtaggttgtgtttttgggtttggtttttggtatagtttttggtataatttaggggttaaattgtgtttgtttttggaggagaatgtttttgtatatttttatggatatttttttatttgttttttagagttaggattatgtttttgtgtatttagtattagttattattgagatttagatggtttggtgataattgtttttttagttatattttgtttgatttagttgagtgtgaatatattaatttaggatgggggtgtatttggtatgttaaataaaggttttgtattaatagaaggtaggggaggaaatagttttttgttattttgtaaattgtttatgtttttggtttgatattatgttattagtaattattgttattgagtttgggtggttggggtagggtggttttttagagttaagtttagagagatgggagagggaatatgggatttgtatattgagggttggaaaggattttttaaggtttattagtttttggttatttagtgtgttttgatgttttttttgtaggaaatgtagagttttaggttttagatttgttaagataaatgtgtattttatatgtttatgaaagtatgaggagtattggtttttttttaaatttatattttttttaggttttatatttttttagtttttaagtttattgattattggagaatttttatttaaaaagaaaaattaaaaaggggttgggtggtttatgtttataattttaatattttgggaggttgaggtaggaggtttatttgaatttaggagtttgagattagtttgggtaatttagtgagaatttgtttttataaaaaaaatttaaaaattagttaggtatggtggtgtgtaatttgtggttttaggtatttgggaggttgaggttggggaattatttgagtttagggggtagaggttgtagtaagtagtgattatattattgtatgttagtttggaggatagagtaagattttgttttaaaaaagttaaagaaaagttaaagaagatggaaagagggatttagagagatgtggaagtaatttaagggtttattgatggaggaatagttatataatataagtgtattgtataatagaatattatttagtttttgaaaggaaggaaattttgttttatgttatagtatgatggatgaatttttaggatgttatgttgagtgaaatgagttagatataaaatgggtagttattgtatttttttatatatataaggtttttagagtggttaaataaatttataataaagatagaaaatagaatggtggttgttagtagttgggggaggggtatggggagtttggtttaatggggatggagtttagtttgggaggatgaaaagggtattggagatggatagtggtggtagttgtgtaatattgtgaatgtattgaatgttgttgaaatgtatattgtaaagtggttaaaattgtatattgtatgttgtgtattttattatggttagaaataagaagtagtagttaaattaaaaatttagattgtgttgtttgtttaatttaaagaaggtttattgagtattattgagttttgattttgtgtttagaattagatttggtttttgaggggtttttaatttagttggtattttattatagttttatggagttatgatttttgttggggttagggggtatgtttttgagaagggatttaattatgttttatagtttggtatttttaaataggttttgtgttttataggattggtattaattttttgtttgtaagttttatgttagtatggttgtgggtttgagtttttttaggatgttgttggagttttatggtttttttttttttgttagaagggtatttttaaataaaattgtgtgtagttattatatagttttttggtttaggtatttttttttagtgttttgagaattttgttttgtaggttaaggtgttttttatgtttttttttttttgttataattattttttttgggggaggaggattagattatgggttttaatgtaagttttaggaggtatatgtttttttttttttttttaagtttttggtttttgttgggtatatttaggtagtttgtaattttttaagtaggagttattagaatgtgatagtttttttaggggttttaattttattttgttttatatttttgtatgagtttgttttggtttttgtgtggttttttattttttaagttttttaggttttttagggatatatagtagatagaggttttagtaaggtttatggtgatttataaaggaggttttttgaaatttagaaaatttttttaaatttttatttaagttttgtttggggtattttggtatgtttttattagatagagagagttattttttttgagtttgtagatttttatttttatgtattttggtttttttgggtttttagggtagtattttttattttatatttagtttttttttttaagattttgtggtaaagttagtaattaggttttttattattatagtatttaagatttagtgttttgtgatttatttttttggttttggggtgtagttttagttatagggggttggggtttgggttttagtttgttttgtagttgagatataggggtaggttttgaattttttaaggtttgggttgggttgggggtggtgggtgttttagtaggtttgggtatttggatttttatttttttgggggttgtgttggtggtaggggtagtgggtattttggggattttggaggtagggggttttattttttggtgggttgatttttggggtttgatgatggtgatttttgttttttgaggggttggttttggtgttttgtggtttaatattttggtttttttgagtttgaattgggatgggttgatggttttggtgttttttatttgtttggatgagatgttaatggatagtttagtgtgttgggatattggtttggttgttttggggtttgagagttttattttttgtagggatgttttgggggagtgttggtttagggagtttatatggtgggttgagggttttgagttttttatgtttaggttttggaatttttgggtggagttggttatagtggtttggagtaggggagtttggattttttggggtggggtggagttgggtgttttgatttttttgattttaaaagatttttttaaggttgaaaaataaagagaggggatgtaattggtgaatggatggttagggaatattttggtatgttttttgttaaggagtagtagaggaaggtaggtgatgtggtggtgagggttgggggtttttttttgttttttatgttttagtaagtggaagggatagttttattttaggagaattattatgagttttggggtagagatgtaggttggagtgggaagatgttgtttgttgtgttttgttatggttatggtgtaaattatatagtttttttttttagttatgtttatataggaatgttttagttttagagaagatttttatttttttttttttttttttgagatggagttttgttttgttgttttggttggagtgtagtggtattttttgggtttaagtgatttttttattttagtttttttagtagttgggattataggtatgggttattatgtttggttaatttttgtatttttagtagagatggggttttattatgttggttagtttggttttggatttttgattttaagtgatttatttgttttggttttttaaagtgttgggattataggtgtgtgttattgtgtttggttttgattttttttttgttgtggttgtttttatttttttttatttttagttaaggtatatattgggatattattagtaaatatatttttattattagttatagtgggggatatgtttttaataataagtgattgtaattgtaattaattagaattgtagtaggaataaaattttattaatgatattaagggtggatattggagtttttagtgttggtgaggtgttgggtttattgagtttattatatttgtagttgtttaattttgggatgtaaagaatattagtatttttagtatagatggggaaagtggggtatggggtagatatagagttagattgtatattaggttgatattagagtttaaggttttaattatttggttgtttggtttttttagtttagtttataggaattaatttttttagttattagttttttttgtatttttttatttattattataagtttgtgtagtgatgttaattattagtttttgttttgtagttattttgtttttttattagggtttgtttttttggaggtagtggggatggtatttgggaagttgttatttttatagtttttataattgtattttaaatgagagttagttgtttttggttattagggttagagtagggagggatttatatggtaggtatatttattagttttttttttaggttagatttatagtgtatttttgtggagatttatagtgtttttttagttgttttttgttttattaggttatagagtttgggttttatgggattttattattgttttttttgtttataggaaaagggatgatagttggtttttagtttttaataatagtgttttaggattaattttagtgttttttttttatttgtttttttttttttaaatgtatttaggtattggggaggggaagaggaagtttaattttttaattttggttgttttagttgttagttttttgggtaaggtatttttgtgggtgttttttttaagttataggtattttttttttttggtggatatagatgaaattttgggttattaagtttaatttttattagaagttgggtaaggagttgtgtggattttagagaatttttagttgttataggttttgttttagttttgttattgttttagaggatatgggtttggtgtggttagagttgtttattttttaagagagtagaaatttggatttttatatgatattttttgatttttaaatgttggtataaagtaaaataagttttttttaaaatattgagtagtttggttgatgtggtgaaattttatttttattaaaaataaaaaattagttgggtatggtgatatttgtttatagttttagttatttaggaggttgaggtaggagaattgtttgaatttgggaggtagaggttgtagagttgagattgtgttattgtatttagtttgattgatagagtgagattttgtttttataaattaaaattaaaaataaaataaaatattgtagggttaaataaaattaaatttataggttgtatttgtttatgggtttagttatgatttttagttgattatgtggttgtagggtagtaggatattgagttttagagttaggggtgtgttaggtgtgggtttttgatatggtgtttttttgtttttttgtattttgtatgtaaattgttggttgtgttttgattttgtagaagttttagggttttaaggaaaggttgaatgtttatttttattagttagaaagtttagggtttaatgtttagaattgaatgtaatgagatgggtttattaagtttattatatttatatttgtttaaatttgggttgtaaagaatattattattgtttttgtatagatggggaaagtgaagtatggggtagatatagagttagattgtatattgggttgatgttagaaagtgtagagtttaatgtttgggtttttgtgtggtttttagggttttttgtggttttttgatttgttttttgttttttgagtattgtttaaattgtttttatatggtgtgtttttgttttatgggtgttgtagagtaggggttggtttttaggtgtttttagtatttttttgtgtggttaagttggagaatagaaattagataggagaaggttttgttttaggtttaatttaagaaaataaatgattttttttgggagatttggtgaattttttttttgggagtttttttggagttatttttattatggttaatttatgattgaagatattgtattaaagtagaggttgttttggtgtgagtttatgattgagtttatggtgtggatgtaatgatttattttagttaggtttatgtgtataagtggattattttagaattggagttggttttttttttagggtattttttttttttttagttgtttgtgtggttggtgttttattattttggttatttgtgtaaaatgtatatgtgtgttggtttttaattattttttttttttttttaatgtttggtgtttttttatggatgggtttttttttttttattagttggtttttgtgtttattgtttggttttatgatttttttgggtgttttggtttagtattatttttatgtttattagtttttagtaagttttgagatagtaggggttgttttatttgtaggggttattttattattaggatggtgttgtttaaaggtgagtttgttttagataatagttaggagattttatagtttttagaattgtaagagaatataattgtgtgttagaagaatagtgagaataggaggtgttttattttggaggtgtttattttttttaggagatgttttattttgggggtgtttattttttttaaggaaattatgttttggttggaatgttaagaaggtgatatttaaatgaagaggtgtttattttggtttatgttatttttttaaatgagtatgttattgtttttttttttttttgggaattttttttaaagttaagtttattttagttttttttttggggagttggttttttatatagtttatattattttttttttatgttattttggttatgttatgattgttgagattggttatgaggggtgtgttttggttttttgggaatagagttgaatgttttttattttatgatattatgtttttattaggttttaggtgtttttagaaaatttattaagttaggtgtggtggtttatgtttgtaattttaatattttgggaagttaaggtggatagattgtttgagtttaggagtttaagataaatttgggtaatatggtaaagttttgattttattaaataatataaaaattggttaggggtggtggtatatgtttgtaattttagttatttgagaggttgaggtgagaggattatttgaggttaggagattaaggttgtagtgagttatgattatattattatattttagtttggatgatagagtgagattttgttttaaaaaaaaaaaataattaaaatttattaaatgttaggtgtggtggtttatgtttgtaattttagtattttgggaggttaaggtaggtttaaggtaggtggattatttgaggttaggagtttgaaattagtttggttaatatggtaaaattttgtttttattaaaaatataaaaaattagttaggtatgggggtgggtgtttgtaattttagttatttggaaggttgaggtagaagaattatttaaatttgggaggtagaggttgtagtgagtttagattgtgttatagtattttagtttgggtgataaagtaagattttattttaaaaaaaaggttggattataggattataggataggtataagttttgagggagtttttaaggaggagggatgtattagatttttatttttattttagtttgtgaagatttatttttgtttgaggttttgtagagggttgattagtgatttttaaaaagatatgtttaatatttaattttaagaatttatgaatgtgattttatttggaaaaagggtttttgtagatgtgattagggattttgggatgagattattttggatttgggatgggttttaaatttagtgtttggtgtttttataggagaaaggtagaaggggatttgggatataaagagatatggtggggagggttatgtgatgagagtagagattgtagatgttgttagagttaaggagtgtttgggttaatgtaagttggaggaggtaaggaagggttttttttttgagttgttggagggagtgtggttttgttaatattttgatgttaaatttgtggtttttagaattatgagtgaattaatttttgttgggttatttggtttttagtaatttgttttagtagttttaggatatttataatgagatttttgggaagatgaaatttttggttgtatagtggtttagggtgaggttagttggtgtggttatttattttttagtttagttttaattttattataattatatttgataaatggtttattgtgggttaatggatatgtggttattttagagttgttatattaggagtttagaggagtgagagttgtttttttttttttttttggagttgtataaaaattttagatggttggagaagttattggaggaattatattattttagatttttgttttattgttgggatatgtggtaatgaaataagattatttttgttagggatgttttatgggtaattgtttttttatggaggatattgtgagttgtatttagttgggaaatattaggagatgtttgttattaggttggtagaatagggttttttagtatttttttttttattagagttttaagattgtgttttgggttttgtagttatatatggttgtttttttttttttaatgtgtaggttttttgggaagttttttgttattatttttatagtggaattggtataatttgtttaggggtagtaggtttttgttattttatatgtttttattttttttgtggagggagatgtagttaaggggtatttatatttatttatagaagtgagagtgtttgtgagtttgttattttgtagattttagaattttgtatgtgattgtatagatttataggtttaattgggtagatttaaaggatttatgtagtagggaggagtattggatagtttttttttttgtttgtaaggagttaatgtaattgaaggatatagaagaggtttttagttgagtattataattgtggattgtgtatagtgttagaaagatgtggagttaggttatgttgggaggatttttatgttgttattggaaggtaaagtagtgttatttttttatttatagagtaggaggtttttatttttgttagttattttttttatttgtgaatttaagttttttaaagttagattttaattttgtaagtttttaaaagtttttttgggttttttttttaatttttattgattttaatttgttttaaaagtttgaagattgtttatgtgttttggtttatttttgggaatttattttaaggaaataattagaagtatagaaagatttatgtatgaggatatttgtattagtattaaattgataaaatttggaaatagtttgggtttttgtagattttttaaatttatatgttaaaggtttgtattattattaaaattatatttttgaagatgagaaatgttgagaatattaagtaaaaatagtaggatataagatgtatataaagattttaattttattttatatatatatgtgtagtttgtatgtatatatatatttatatttgggtagaaaataatgatttttggatggaatgaatggtggtgggtgttgtttattatatttttttgttttttgagatgtttatattatatggggattatttagtatgtttagggaataaaattattgatattgtttttttttttttttttttttgagatagttttgttttgttgtttagattggagtgtagtggtgtaattttggtttattgtaagttttattttttaggtttatgttatttttttgttttagttttttgagtagttgggattataggtgtttggttattatgtttggttaatttttttgtatttttagtagagatatgattttattgtgttagttaggatggttttaatttgttgattttatgatttgtttgttttggttttttaaagtgttgtgattataggtgtgagttattgtatttggttaatattgtttttaaaaaatatattttggtattggttgggtatggtggtttatatttataattttagtattttgggaatttgaggttagaggattgtttgagttaggagtttgagattagtttgggtaaatggtaagattttatgttggaaaaataaaattaaaaaaaaaaaaatatatatatatatagattttgatgttaataagttggagggtgtgggtaattgtatgttggtttatttttatttttatttttggaaaaatattttatagtttaggatgggtatagggttttttttatttttaagtatttatggttttagttgttatataaaaagaggttatagtgggttattttttagatgtaaatttttttttttaggtttatggtggggttgaaataggagtagtttggatttgggtttatttagagaggaatgtgttgtataagggattattgttaaggtttttgttttgattataggttgtttggtaaattgtttttagtttttgaaattagattaagtattttttggtgtatatattaggttttagtttggggagggaatattaagtgagttatagagttttgttttagtttgggataaatgttatgtaaagaaatggtagagtttaaggttagaataattttatgtgtagtttagtttttgtaggagggagtaatgtggtttttgtttagggtagggtggaattttaggtttaggttttaggaatgttagttttggttaaattgggttttttttgagtagtagtaaagtaggttttgtttttgaagaaatattggttatttaggagttagggttagggtttagggaagttggatagatggtgttaaggagtagggaagtatttttttgtatgttattttgagtttgtaggaaaaagttatgggaaaattttatttggtagataattttttataatttttaggatttatagagtgagtttagtagtatgtatgttatgggtatttttttgtttttatttttttgtgatattggattttggtataggtttttgatttgtgtagggtggggtgggtagttaggtagggttttggtgttggtagagtggggtttagttgtaaaggtttttttattttttatttatttaggatttgggggatgaggtttaaaggtttggtgtgtttttaaggagtttaaggattgttttagggttggagataggatgtatgggtttgtatagggattgtgttttttattttagggttgagagtaggagaattaaataggagagtgatataattatagtttattttgagttttagtgtttttagtgttatttgttgtaggaggtgatggggtaataaggtgtttttgaggttaggtgtggtggtttatgtttgtaattttaatattttgggaggttgaggtgggtggattatttgaggttaggagtttgagattagtttgattaaaatggagaaattttatttttattaaaaatataaaaatagttaggtgtggtggtgtatgtttgtaattttagttatttgggaggttgaggtagaatagtttgaatttaggaggtggaggttgtggtgagttgagattgtgttattgtattttattttgggtaataagagtgtaattttattttaaataaaaataaataaataaataaaaaataagattttttgggtgtaggtatggtatgtggtaggggtgattgttgttggtgtaattattattttttgggtgtgtgtttgtgggggttgtgtatgttgaaatgtgtggttattttgttggtgattaaggttgttttggttttattgttattaattatgtttattgattttatatggtttatttttgtgtttttatttagagttttttttagtgtttaagtttttggaaggttggaaggagtgagtagtgtagtttttggttaagaattgaagtataaaaattttagtttttttatttaattttaggtgggataaggttgggggtatggtttgtagtttttttatgttgtttggtatgggggttgggtagttatttgtggttataatgagttggtgaggtattttttattggttggattttttgtttggtttatttttatatttaggtattttttggtgtttttttttattgaaatttttgttttaggatttgtttttggagggatataaattagttttttagaattggtttgggttgtttggtggaggagggaggtggtttttggggtaggtggagtaggttttggatagggaggaggatatagttggggtgatggggaggggtgtgtttttaggaagtaaaattgtttaaaaggaaaggtttaaaaataggtgtagtgaagttgagtggagtttgtaaagggaagttaggaaatagtagtgttagtggagggtggtttttaggttttttatagagagttatatttgtttagggatagggataatgtgaatagaaggtaaagtttatattaaggtggaggaggtgttttttttttagagagttgtagttagatagtttaaatttgttaaaggtttgggagggaagaattagggtattattttatttttagtttaattttttttttagttttttttttttttgtttttttaaggttaggtttggttgggttatagtgttagtagttaagatttgtttttagtgttggtttagtttgtaggaggttagtttggtggttaaaggttattgattgtttaggtttatttgtatatgtggtttaatgattgaggtttgggatttggggttattatttatagtatttttggataaggaggaaaagaattatttttattaatttttggatggaggtgtagggagtgttaatagtatttttgaaaattttaaatgtattaggggggttagtatttagggaagagttataggaggttattttgatggattttgatgattatttttgtttaagtgttaggaggaggtttttttttttttgtttttggtaattttgggtttaagaagttttaggtattttggaggttttttttgtttattatagttttatttaagaggtttggtttattttgtaatgatgatgtgagaatgagtaggtttgtttagtgttagagtttgtggttggatttttggttgaggttaagagaaataaataagttttttttttttttttgtatgttataggaagagtagtttgttggttgtaaggggattttttattttgtttatggggtatagtagtttatagtattttttttagaaatggagtattggtaggtttgggtttttgtaagatggaatataaaggggtgggtagttgattttaatagttagtttttgggattttaaatttttttttattttttaattttgtgatgttaatttttttttggataaagttttttaataatttggtaagttagtattagttgaattagttttagtttgaattagtagttttttttagtttagttatagttttatttttttagaagggaaaagaagttttatggatttttttataaggaatttttagaatttgttatggtgtttgtaggggatattggtattaattttgggtttattaaatgtagtgggtttaatagtgttttttaaaatgatatgttttaagttttaatttttggaatttgtgaatatgattatatttggaaaatggatttttgtagatgtaattaaggtaagggttttaaggtgagattattttgaatttagtgggttttaaatttaatggtgagtatttttataaaagatagaaaaggagaaagatatatagatagggggagaaagttatgtggagataggggttagagattagagatgatggtgatgtgtttgtaggttaaggaatgttaggaatttttaggagttgttggaagttatgtttgtaagtttttaggttgtggtattttgttatagtaattttaggatatagattttaggaatagaatatagaaaagaaatgggaggaggtttagagtttgttgtggttattttagttattttatttgatttttttagtgttttgttaattttgaagttttttttagttattgagttattggttttgaaaaggagatatgggtgttttggagttggtttagtttggtaggaggtagttttgttttattgtttttttattagttattagtttatataggttttttatagtgggtaagtgtgttgttgttttagtttttgttggttttttttttgtttggttttattagttgtagagttttttgttgttgttttttttggtttaagaggtttatatatttagtttttttgggataaatttagtttatatttgttgttttattgtagttatttaagggttttttttattaatgtgttttttaagggatagtaagttatatggttgttttatttggggttagaattgtgttttattagagtaaggttttggagtaattatatttagggttagggagttatttgtttaagaatagaaatgtgtggttgggtgtggtggtttatgtttgtaattttagtattttgggaggtagaggtgggtagattatgaggttaggagattgagattattttggttaatatagtgaaattttgtttttattaaaaatataaaaaattagttgggtgtggtggtgggtgtttgtagttttagttatttgggaggttgaggtaggagaatggtgtgaatttgggaggtggagtttgtagtgagttgagattgtgttattgtattttagtttgggtgatagagtgagattttgttttaaaaaaaaaaaaaaaaagtgaaatgtgtagttttttttttttttatttttgaaatatgaaggggaggtgattgtaggttttttgggaaagatttttttattttttttttttttttttttttttaagatggagttttgttttgttgtttaggttgtggtgtagtggtgttatttttgtttattgtaagttttgttttttgggtttatgttatttttttgtttttgttttttgagtagttgggattatgggtgtttgtttgggatagttatgtagtagtttttgttttaagttatttttttttatgtagagtagaattaggattatagtaaaggttttagaggaggttattgtttatagggttttgggttttttttttgaaaggtagtttagtttttaagagggtaatagtgattgatttgggatgaaggtttttttgtgtttgtttttgttatttattgtgtgtttttggttttggtagttatagggttattttaggtggattttaaagtggtgttaagttgttggatttttttttttttttattaaattagttatgggaatgggagtatttttggtatatttttagatgtgttgtattggtttagtgttttttttatttttgggttttaaattagttgttggttgttttattaggagtagattgaggggaaatgggtggaagttgtaggggaagagatgtgaggtagataaagaggaagaattttttggttggggtggggttgttagggtttgggtgggagggttgtttattttttgtttttggtggaaggtagtagaagggtgggatggatttgtgtgggagggtttaggtgtggtttgtttgggggtaggagagggattagatgattttttaggtttttttgggttaaagattttttgataaatggttgttgttgaaggtaggagtgaggttttgggaggtgattgattttgaaaaattataggttgtagttttgagggttttaaaggttaagtatggagttttttaaaatgaggttttttttagttttaatttatttatgttttttaggtggttttagatattttgttagggtttttttggtagttttttgtttttgattttggagatagagaaatgtgatgttggtttttggtttgtttatagtttttttgtttttattatagggttgttagttatttttttagtttattgtgtgttttttttttttttttatttttgattttttaataatagtagatttttttttaaatatttttttgtttagattttgggttttatgtatgttgtttttagaaatgtattttagttttttgtgaggagttagtaaggttgtttggtgtttttttttatggatgggaagttttgttggggattaggatttggatttggagattttgaggagtgtgttggttagtgtttgttttgaggtttgggatagagttgttaggtataggtagtattggtgtgagggtttagttttttggataagtttttttttgtttgtttttagatttgttattgtatatataggtggtgattatttttgatttgtttgggtagagaagttatttttttttttttttttgttttattgtttattaggggaaatgttataagtatttaaaaaatgtaaaaaaaaaaaaaaaaaaaaaaaagtgtttaatattaggggttatttggtttaggtggagtttttattaattatggggttttttgtgttgtggttttaaggtgggtagttgatggtttttgtttgagttaatatgagttgtagtttaattataggggatggtgattttagggagtagagtttaggttttggttatagttgtatttaggagttagttgttttttagatttgtagagttaggggagaggtttggaggattggtattgaatgatatgatttaaagtgtgttaagttgggttggaggtgatggtagagttatagtggttatagagtttttatgtgaatttatatggatttgtttggtttaggttttgttgaattttagggtgaggaggatttggtttttatttttaaagatatgaagaggttgataaagaagagttataggtaaaagggggtggtgggtgtgttgtgtaggaggggttgtaattggatgtagaagattttagaaggggtaattagagagaggtagtatttttagaagatgggttgtttggttgttttaaatagtttagggtgtgattgaggggatttttggatttagttggggttttttttgttttgagataatgtattgggaaattttattaagtttatttaagaatttgaaaagttttttggaaatttagtgggtagggtgggtttttgggaggatttttggtatattgtgagagttagatatagtgagggggttttatatttttgtttagaagttttatggtagaggggtagaagtttagggaggagtaggtgttgagattagaggggtttataagagaggggtttggggtagggggtagttgttgagaagtttaggaaatggtgtttgtttttggggaagtgaagttttgggaatagggttggtgaaggggggtgggaagggggaggtgggggtggagggttaggttagattaggtattttttttagtagtagatttatgagtttttggaatttgtttatagaagtgataagtgttttgtttttagttttgtttatatatttatttattaagtgtggtagggatagttgttttttattatttattttgggatttggatttaagtggaggtttttggaggggtagatttaggggaaagggtttttttagaagtagttgttatttagaggatttgagatgagaattttattatgtttttattagatagaggagatttgtggtgtttttgagtttggttttttattttttatttagtagtgttttttttgtttattttaagtttagaatattttgttttttttaagattagttgttgtagtggattgaatagtgatttttaaaagatatgttagagttttagtttttggatttgtgaatgtgataggagttggaatagggtttttgtagatgtaataaaggattttaagaggagagtattttggatttagggtgggttttaaatgtaatgataagtatttttatgagatatagagatatagagaaaaggttatgtgaagatggagtagggagtggtgtgatgtatttatatgtttaggagtatttgggagttattagaagttgggagagaggtttgggttggagttttttgtagaggttttaaaggattagtttggttgatattttgattttggatttttggtttttagaattatttttagtttttaaagtttgtggggttttgttgtagtagttttagtaaattgttatgggggttttttttttttgttaagtttggtatttaaagttttttagttatttggggttaattatattgattttgggatttttaggttatttgtgtgttttatttttttgtttaatttttagtgtttgtgtggttatagttttttttttgtgatatgagttttttgggtttttgagtgtttatttgttttgtattgaaggttgaagttaaattttggagagaattgattttttttgtgggtagggtaggtattgtgtttttagtatagttagagggtattggttgaaatgtgtttttgtaaagtgttttttttatgtttgtattttttttttaagtggggaagttagagaggtttttttgattttttttttagttttttggggtaggaagtttgtggttatttgtttgtaaggattaggtggatagataattagttttttttaggttatattttattaatagagggttttttaattttgttggtggtttatgagagaaggaaaaattgaaggagttgtttatagtaaattttaaatttttgtgttagagaggtttatggttgagtaaggtatttttatttttattgttttgagttgttaatttagtttagtttagtattgtgatttttgatttgtttgtgggttatgggagtttggtttgttaattagtattttttagatatttattttgtgaagtttttagtggttgagtgtttttttgttttttttggatagtgtgggttataggggatattgggtaggaagatagttaagtttttattgtttagaaattgtttgggtttattgtagtaatagggatttatttattagtatgaggtttttttgtaggaggggtgggggtaggagggagtttgtggggtatagggttgtaggaggagttatttttttttttattaaattgtaggttttagttaagttatttttagtatggttgtttgtgtgggaagtttatagttgagggattgtttgtatgtggtatgtaggagttataagtgttatttatattttattttgggttaggtagatgatttttttggttttagttttttgatgaggaataggaagggttggattgaaagattttttttagtttggatatggaatgattttatgagggttatggtgaggtttgttttagttttgtatattagtttgggttagtagtttttaaaggtatagttgtaggggttttggagtagggataaggaggattagtttattttatttttttgggtagaggttaaggattttgtttttggtttatattttttgtggttaaaaatgtagaagtaagtagtgttggtagaggtatttagatttttgggtaaagtaggggttttatttgatattttaggtttggagtatgagaaaattagtttaggttttaggttttttgattgttagtgattagggaatgtgatattttttggtttttgtttttttattttttaattttagggggagattaggttgggtgatgtgtttttttttttgatagtaaatttttatttatttttatttttatttttgttttaagagggggttttttatggttgggtgtagtggtttatgtttgtaattttggaattttgggaggttgagatggatggattatttgaggataggagtttgagattagtttggttaatatggtgaaattttgtttttattaaaaaatatgtgagttggtaattttaagtttttagtagtttttgaatggaggttttttttttgtaggatttttaaattttataaatatgagtgtttgtaatttagttatttaggaggttgaggtatgagaattatttgaatttgggaggtagaggttgtagtgaattaagaatgtgttattgttattttagtttgggatatagtgaaattttgttaaaaaaaaaaaaaaaaaaaggtgggggtttttttatgttgtttaggttggttttaaatttttgggtttaaggaatttttttgttttagttttttagagtgttgggattatgggtatgagtttatgaattttaaaaaataatatttattgttttgtttttgattgtaaaaggaatttaggtataaagttgaaaatttgtaaaatgtataaaaataaagggaaaaaatttataaatttataatttaggtaatttttattaatattttgataaatgtttttttattttttattggggagtgtgtgtgtgtgtgtgtgtgtgtgtgtgtgtgtgtgtgtgtgtgtttaaataggtttatatagtgatgatgttgggtgtttttttttatgtggtgttatgtggttgaggtttttatatattttgggtttgtttttttgatttttttgtagttttgatgttttgattttagatatgttatttttggtttggattgtttaggagaattatttttggattttgttaaaaaatggattgttggtttttaatttttggtggttttggtttaggagggttgggtaagtttgggtattttggagtgtttttggggtgttgtaggtgtgaatttttgtttttttgaagatttataagttttattttttttatttttttttttttttttgagaattttataagaggaaagtttttatttggaggttgttagggatttggagttgttagtttatagttttattttgtttttatttttttgggagttatttaaggataatgtttagttttagttgttaagttttagttttagggttagttatatattgaaggatatgtagaagttgttgtgtgttgggtattgttgaggataaaggtttgaatgataagtgggaataaagttataaggttttaaaatttgtttgaggttttatagttagggttttggaaatttatgaaaaaagttagtttaatattttgttatggaatataggtaggagagggagtagtttttagttagtttttagttagttttttgttagtttttttgtgaattattttattttgggttatagttagggtagttgttgtttttttttttgtttgatagtttttgagggtaggagttagtttgtttattattgttttttttttattagggtttggtattttgtttggtatgtagtagaagtttaagaagggtttattgtgtttattttgtaatagttaatgtgtatgagtgtttattatatttgaagatagtgatttatttttgtttttattgtatagatgggaaattgaggtattgagaggttgatgatttttttatattgttgtgtgggtaagggtaaggttagatgtgagttggtatgttgggttattgtgttttttgtttatattttgttttgggtttgggaaggttatttttggagatttttatgatgttgatattttgtttagtttttttgtgtatttttttttatgttttttagttatttaaagtattagttaggtagtattgttattttggttttgtaaatttagttattgagtggaagagtagttaggttgaagtggggtagaggtagtttttgttagattttagggttgggatttttagttatttttattttttaaggattagtagatagagatttttattgtgtttagttaggggttagggaataggtttttatagtgggggagtgatggatggatgtaggtgtggattgggaggatttgggttggttttttagtgttggagttttagtagtttaatttattttgttgggtttttgtggggattaaaagatattttgtatataaagtattagtttagggtttggtatttaggaggtgtttaattaaaggaaatggttatgaaaaataataaggagaagtttagttataggaggtgtttgtgggtaaggagagaatagttggaagggtttggatttgggttagagataaagaatgtaagagggagggagggagagaaggagggagggagagaaagagggagggaaagaaagagggagggagagagggagggtagggtaggtaatagttggttttagggtagttgtgtgtaggagtttgttttattatttaaatattaggagagatgtaaatatttgagtgaggtttttttagtttggttttgttgtggttatagttagggttggagaaagagttttttttttattagggtttttgttttgtgttttttattttagttgttttaagattttatgtttttgggttaggagtaggggtttgagagtagtaattaggtagggtagtggggttagggagggattttgtttttgtttttattttttttttttgtttttgtttttatttttttttttttgtatagtattgggtttgtaaaggtgtgaatgaaggatttttttttttatttgattttaaggggtttaggtggttaagggttttttttgtagtttagaaaaaaaagtaaagtagttttttttgaggttttttggtggaggtttagggtttaaagtttgttgttataaatttgtagttttttttgtttttttaatagtgttttttttttatttgggttattttattattttggttttttttagttttttaggttttttggggaggaggatagatgtagagtttggattttgtgtgtagtagggtttttttaatgttgtggtgtattttgtttggttgtgggagtttgttttatgttatgatttgtgttggtattaatagtttttttttttattttttatttgagtgttgagggtagttgtgttaggtatagatatatagttttttatatatattatgagtttgtagaaatggtaagagaaggttgagtgtagtggtttatatttgtaattttagtattttgggaagttaaggtgggtggattatttgaggtaaggagtttgagattagtttggttaataggatgaaattttgtttttattaaaaatataaaaaattagttgggtgtggtggtgtgtgtttggagttttagttatttaggaggttgaggtaggagaattgtttgaatttaggaggtggaggatgtagtgagttgagattatgttattgtattgtagtttgggtaataagagtgaaattttgttttaaaaaaaaagaaagaaagaaaaagaaaaaaagaaaaggaaaatggtaagagaagttggttagtattatttgtttggtaaatttttattttggtttttggttaggaagtttttttttaggaagtttttttgttttatttttttttttgagtttatgtttagatttttagtgtttagaatagagttggtttttggggtatttatggatggttgttggataaataaataagttaattgttttttttatttttagtgatgtttttggtttggtagggtatttagtagtaatgttttttgagtggattttaaggagtattttttattgtgtagtttgtattagggattttagttttttattttaaattaaaggaaaaaatttaattttagtaaatatatagagtattttattttttgatttttaatggggggtaagaggtagaggatagaggagaagattatttttttaggtttggtttggagttaaaaagatttgtatgtttttattgtagataatattggtttttgggggatatagggtaggggtttggtttgttttttgtagggaaattgtttatttatgtggaaagtggggttaagggtttttgtttggaattagttttttgtatatggggtggggggtggggatagaaggagattttgtttggattgtatggaaatttattagattgttggttgttgatttggtaggagtagagttatttttattttttagggttttgtttgggggaggggagaggttaggtggttttgtttaggttatattttttatggttaggaatgttttttttttattagaaagaaagatgagataggtttattttgaattttttggatataggaagggggtttatttgtggtttaggtggtttttttttttatatttaaggggttttataaggaggtgttaggatttttaggttttgttttagggaattgttgtttgtaaaggttataggtagagatagttaggaatgttttttatgttattggttatgggttggaggttgtgaaattaggtatagaattagaaagatttgttataggttgtaaagggttttagagagttttagttttttagaggggtagtattgtagaaggggtgagaaggaaaaattagtttttaggaattgtttatttagagtttatataatatttaggtggtatgagataatggtttattttttattttatttttttgttgttttttaagatttgagtttttgggggtgtttttagtagatagggggatgtggggtaattgtttttttttaattgtatatttggaggtaatttatatttagatgatttttttgaggttgtgattagagtttggggtaggggaggggaagtgggtggatgggaaggtgagggagatttttttaggaaagttgttttaggtgtttgtaaggttttattgtttatatttaaggtataggtttttggttttgaggatataggaaatttgatgttatgtggggaggagggtattgtaatgtatttaaggttaggttttttgattttttggatattggataaatgatggtttttttagttggtttagagatgttaggagtgatagaatgttaaaggttgtagggggatatttagaaatttttgagaaagaagatggataaggaaaaataaaaaaatatgagaagtttagtagagtttgagttttgtatttttggttttttttatggttatgggtaattttttggagatttagttatgggagtagtggaggtaggtatgggtgggggggggggtgggttttattgtttatggttttggttgatattgaggttatttttttgtttttttaagtttttgggtattggtaggatttttaaaaatgataataaatttgaagtttttagaattgtttgttggtttagtttaaatggagttttggggttttgtagattaaattaaatagtttgagtttagaaatgttttaggtgtttgggggtgtttaggggttaattggtgggtttgtttggttggagagatgataaatttttttatttttgggattgtgttttagagagttttggattttttggttttataagtaatttagagtttttaaatttgggaaaaattaagagggttttggaaagaaaggtagtgtttgattatttttttttagtggttttgttaagggagagtataggaatttggtttttggttgggtttttgggatgaattaaaataaaaagaaaaagttgggggagggggtggtggaattgtttggggttttagtttaggttatatattaaggagattttagaggagtaggttagttttatttttggtatgatgatggatgggtatttggttggttggtaaagggaagagatggtaatagtgaggttttgaatttagtggttaagatttatttttgagtgtgattttttttgatgtttgggtatgtaagaaatgggaggtggagaaaggaggaggagattttagttttgtttttttggtattaggttattagggaatagtattttttttttaatgggtaggtagaggttataggttgttaggttgagaagtttttggtttttatagataaatgtatagtttgtatatttgtattattttgggtgatgtttattatgtatggttattatgtatgttttttattattaagatagttgatgagattaggtggttattgtgtattgggtattgtggtgattgtttgatattgatttttgggggtttaggtttttggtgggtttgtttttttaggtatttagttttttttttattttttgatattttgggtttagtgtaggggtatgggggtgtttagtggatgggtttatgggttgggtaagtagtatgtagttttggtttattagtttttggttttattattagataagatgagattgttttagttgttagtttagttttgtattatatttgattgggtttttgtagaggtttgttggatgagaatgtttagggtagtaggtattattttttgggatgtatattttgttataattgttttttagggaaaggttagtttgtagagttgaatgtaggttgttagtgtttttgttgtttttatggtttggttatttagtaagtgtttattttattgttagtgtttggttttgtagatgggtatatggtttatttatttgtgatattttagggtgggggtgggggtagatggtggtagggaagattaggataattttttagtaagaggaatttgtagttaatatgatgttagtttttagaatgttagttaggtaggaaaaggggggttttatggttgtattgggagtttgagtatttgttgggtttagagggatttttaggtgggtgttattggtattagtgtttgttgtgttttttataattagtggtgattatgttgtttggttttatttatatagtggtattatataggtttttgtttgagattttttatttttagatttgtatatttaagtatttaaatttatttgttttttgtaaatgttttttttttttgtttagatgttatattagttgtgatatttattatatttgtaggaggtaggatttgtgtttagtgttatgggttgtattttagagttttttagtaatttttaaagagagttgtttttaattttattttgtaggtagggaaataggtgaagaaattgaagaaattgaagttgtttagttttttaatggtagagtgagggtggtttgggtatttttatattgttatattttttatttttttaaagtattgtttttttggatgtaaattttgtttattagttttatttaaaatttttttggatagttatagtttatagaaagtatttttagtttgtagttatttagttattgtaggggtgttttggtgtttatttttatttgtttttttttggatatttagtttagagaatttatagttttgttgtaaggttgattatagtgtatttgttgtttgggtgttgtgtttgtttttttttaaatgaattaatttgtagttgggatagtgggtttgtttggttttgggttttgaatttaaagagtattaagttagtgttgttagtggttgtgggatttgtgtaagaggtttgtttttattttttatggtttttgttttttattataaaagtttaaattgtagagaggtagtatttataggatgttttgagttttggttgaaaggtagggtttattatgtaagaggtttattggtattaattagggataggtttgtatttattattaagtaatggggtttttttttttagagaggaaagaggtatttgaattttgttagtgtgttagtttttatgttttggaggtgttgggatttttagataagaaggtatatttatatggttttttttatttagaagtttgttttatagtttgttttgtttttagaatatagatttgggggttttttttgggtgatagtgggggtttgggagaagtttagatgttatatagttttgggatttgagtatgtgggttttgggttagattgttttaataaatattaaggatttttggatttttttttggtgtgtaaatttggttatagtaaatattgttgagtaaagtaggttaatagttggtatttggaaaggtttttgttatataaagatttgagttgtaattgtgtttgtgataatagatttggtttgaatttatgaaagtatatgttgtttgttagttttgtgtttttattaattagaagggagaaagaggaaagggttattttttttgttattttattatgggtagtggtgggtgttgtagttgtttggaggtttgtttgtatagtggaaaagtagaaaatgagattttaaaaattttattagttaaatataaaatattttttttgttgttatgtggtggtttttatagagttttaaaattttgaagtttggagatttattttgaagggggagtaaaggtgggatgtgggaagtttgagtttatggaagatattgatattttttttatttttgggaattttgagtttgaaggatttggtttgaatagtggaaggattgaatttttgtgtaatttattggtgatggaatataaagttatggtgtttttggtttttaagatgggagggatggggaaggttttgggtgaaggggataggtggggaaggaaaaggtgaagagaaaggtgttttttagggagggggtagatgtgtttaggatatgggatattggtagaattttaattttgagtatatatataggtttatggatggttttttgtttatttgttttttatgggtgtgttgtgttggtttgggtatttgtttttttttttatgttaggttatttgttgtttattttgtatattgttattagttttaagttttttagaatattttgattagggttttgtggtttttgttataggattttaggtttagatgtttgtttgattggaaaattgtttttagagatgttgtggtttagagtttgttttgttttggggtggtttttggagtttttgttttttagtaatttatatggtgataggtatttatatttgttggttttaggaattttggggttattattttagtgttgtaaggagttggtagttttttttttatttttttggtttattttgtaggaattaagatattaggtgagttgttttgggaaagagatttgtgtttttatggtgttgtttttgtgtttatttttagttattttagatgttttttgtggattagttgtatttttggtgggtatgtttggttttttgtagtttggtttatatgatttttataggtaggtttttttttatgttttagttttttttttagttagtttattttagttttttttattgttgttggttgttgttggttagaaggttttttttttttttgtaatttaatttttatttttttttaaggtttgttttttttatattgattttttttttgttagttagtggtgatttttttttattttgatttggaagttgtttgtttatattatttttggttgggttgaattatatttttttttttattttttttaattattttttttttatgtttgtttgtttatttaaggttgtttaatttttatatatatatttttatattttttaattatattttaggttttttgggtattagggagggttatttttttatattttaggttagtttttatgtatatgtgtatttatgtatatatatatttttttatgtttattgatttgggttatttgatggttttaagattagaatttttagtaaaattatttaggatatataagggggagattgataaatatagggaattagtagattgaggttttattttttgagattgagaaatttttttttagagttaaaggattgttaattgttgtattaggatggttttaatgagtttattgttttggattaaattatagggttataaaattggtttgggagatagttgtagaagtagttttagatggaggtatatgggggtaagggtggagttatatttagagatttaaggaaggggtattaataatttttatagtgtaaatggtgatagttgtataatgaatataattttaaattttggtttttttttttgttatagggtttttgttgagatatgagagtttttttttagaaattttattgggggtttgatattttttgttaggaattgagagtagagattttgattttgtaggtaggaggagagttttgtataatatagggtttttttttataagggtttattggaaagtggttagattggttaagttgtgttatttggatatttgggataaggaaggtttttggaggagtggttgtagggaggagttgtaaagaggtaggggtagggaggttatatttatttggggattgtaggaggtttaatggaatatagtggatttagggagattttagtatgagtatgtgtttaaagatgtttagatgaggaggtgttgtgggggaggggggtgggaatagtaagtttttttagttttgtagatttagattttttttttttttgggaagtagggatgtaaagggatagagtttgaaaaagggtttttattattaagttgataaagtaattatgatgtttttagtttatattttgtatagtgttagtggttattggattataatttttttttgtttttttgttgttttatattttttttaggtttagttttgaagaatagttattggtattttgtttggtgtttagttaaagttttggttttttaggaggttttgttttttttatttagatagggttgattttaggtgggttgtgtgggtagttgggtttaggatatttagatgttagttttggttttggttatggagtggggaggattttaggttggttattttttagtttggtttgatatttggatagtttgtttattttaatatagttttttttttttttggtttattagagggttttgtttaagttagtttaggagtttttttgaggggtgggggttttaggttttggtagaggtaggtttgttttttagaagttttgttttagagtgttggagattattgtgtgagttttttttttgtttgttgtatttatttttgtggatgtaggatgtagagttttagtattggtagttaagaggatgtaggaaagtgtatgtatttataggtttagagatgtggatgttagatttaggtttggatagagtagttttgtaagttttaatatattttgtaaattttgaagataggagagagttaaaatattttttttgtttgtatgtaggttttttttgttttttatggtttgattttgggaggtggatgaggatatttttaggtttggatgggggttatgggatattttattttagattttgttatgatttgggttgtgtttgtttggtgtttttggtttatgggttgtataatttggtggttttgaaattggtgtgggggaggggagggttgtttatttgagtaggatgtggttgtttatttagttggaggtgaggaatgatttttttattttgttgttgggtttaagtggggtttgagagttgttggggagagttaaagggaggggattgatggattttttagagtgaaattgtgtgttttggagagttttgaggtagttttgtgagtttttgaggaggttgttgttgtttggtaaatataaataataataaaaggaaggaaatttaggtggtagtgtgtagaatgagtatagggttttgtgagggtgtgtagggtttatgtgggtgtttttaatagggttttttatgtaggtggtgtgggtatggggttgggggtgtgtggtgtttttagtgggagggtgtttggattaggggttttgtttttttttagtgtatttttgtttttttttagtgtatttttgttttgtgttaggtttatttgtagggttttttttagtatgtttgtggttgtagtagttagtttagtatttatttttgaagtttgaaatgattttatttagttgtgtgttgattgtggggtttgatatgatggttggtgggtagtgggttgtgtggagggtagtggtgaggaagtgtttttggtggggtttgggttttgtgtgttggttggggtgttgtgtttgtgtttttgtagtgtagagttagttgttggaggagtttttaggttttttggtttagttgaatgaatgggggaggaaggtgggtgttggtttttttttgtgtgttgtgtttttgttttgtttttgttttttgggtggattaggtttttgtatttgtattggtttttttgttttgtattggttgttttgtttgtttgttaaggttaggtttggggggttggggtttgagtggttgttgggggatagttttgggtatatgattggagtgttttttttttttttgtttggtttgtgtttaggggatggtgagagatgtggttttagtttttttttttgggtgttttgttgtggttagatgtgggtggatgtggaggttgggttatggtgaggagggtgggtgtttagaggggaagagatttttttttttttttgggtgtagggtttttttgtaggaggttgtatttgggtagttaaataaagttttttgttattgttgttgtgtgttttgtgtttgtaagggttaaatggtagtgtatgtggttggtaggtaggattttggtttgtgggtttaagagttgaggggtgtagggtgaatatgtgagttttatggtattagtgagaggttattaatttttatttattgagggtatttttgtagttaatatttttattatgattattgttttgggggttattgttgtatttttttgggtgagttttggagaaggtattgtttgggagaaggggtatagggtggggatggaatatggttgttagagaagttagggatgggtgatgtttttttttttttataataagggttttttgagagtaggaagtagattttgttaggagtagatgtttttgaaggaaggtgtgaaggaaggagttaggtagtgagtgagtagaaagggagttgttttaagggttttttttttttttttgggttttaatttgaggtttagttttttttttaggttagtggtttttatttttaaattatattatttataaggtaggtagggttgaggggttggggtagatttggggatttgggttagatatagaatttgagaagtaataggtttttatttttaagaagggttttttaggtttgttatttataagagagagaggtgttttttttatttgttttggaaagttagaaatttatttttgtatgttttttttgttattttgttttttagatttttggtttttgtttagagttaggggttatgtgagaatttatagtatggaataatatttttatttttgaagtagtaggttgtaatgttataattgtattttggttttttgaatgtgtggttggggagtgtttgatagtttattttgggtttgaggttgtttgttgtttatttgtttttttttattttttttgaaatattttaaatgtgtaggagtgttgagattttttagttattttggagaggtggggggtagggggttttttgtggaaaatgttttaggtttgggtggttttttaagtagatgaaattaagttttttttttttaagaaaagtaggtatttttttttttatgttttggatattttgaattatttttaattaagtgagtttgtggatatgggaattgtaaaattatagatattttagatgtgtgtatatttttgttggtttgggagtttgggttttagaaatgtagttattgttgttattaatagtattttgtattttttatgttaggttagggtatgttttgtttgaattttagtatttgggtttattggatagtttagtttttattgggttatttgtttatgttgtatttggggatttgggggtttagtatttaagaaatttagtttaataatatagtttttttgggaagatgttgggtttggtataatagttattttaagttatagtattatttttgagtgtttttttaaaaagtatttggtgagtgtggatatatttatgtaattgtttttttttagggttggtatggagttttattagattagtatagggttagttaattgtatattttttatttttatgtatagtgtagtaaatatatttagttttttggggagtgttgttagggtgtatgttttattaaaatgggaatttaagggataatggtaggagagtagttagaaagtgtgtatgtttttgtgattgtgtttagagtttattggttttagttttagttattgtttttttaatgtaattatttagagttatatgattaggtttagaaatttttaggtaaggaggttttttgagtttttttaggaaatttaaattagggtttggttatatttttagttaggaagtttatttttgtatttaattaattgttttaattgtatattatttattttttttttttttttgtttttagaggagatgggaaatagttgggtattattttttaagttataattattttttttatatttaaggataatttagttgttttttggtttttttttttttagtttaaattatttttttttagttttttaattatattttgagttgttttttgattatagttaagggttgggtttagtttggggttttaggattttaatgaggttttattgttataggatagtgaggaggttttttattttttttttttagggttttagggtttggatatatagttttagaaggggtattgggtagagaagatgtatgttggtagtagagaggaaattgagttgaaatttggtaagaataaaagaattataaaggtttgtgtatttagtaaggtgtatttttttatggttataaaagaaggtaagattgattgtaggtttggttaaagggattgtttgtgtttttagtgtataatgagatttatagtgggttggtgattttttttaaaataaagatatgtttatttggaattttaaatgtgatttgattttgtttaagggtttttgtagaaagaatttaggtaaggattttaagataaggtgggttttaaatttaatgttgtgtttttttaagagatagaaaagaaagtatagagatatagaaaaaggttttgtgaagatagaggtagagattggagtgatgtagttataggttaaggaatatttggggttattagaagttggaagaggtaaagaaaggtttttttttggagtttttagaggaagttggttttgttggtattttgattttagatttttggtttttagaattgtgagaggatatattttttttgttataagttatttagttttgatagttgttatagtagttaggagaaatttgtgttttatttttatttgtattatgttttgaggttaaagttttatatagtaaagatgtttaagtaattataaattttgtgggtagtttatttgtttagtagattattgttttaagggaagggggatggggatagggaagagagttataggaaatttttgtatgtttttttggaaatgggaaggagtaggtttggagagaaattttataggttaggttttggggaaatgaagtttataaagtgtgggaatggagtggggaggaaatttatgaggaagtagtgtttggtgtatatatttatatttatgatttttttttaggtatagtttttatggagaggtttagttggtagggaagtaaaagaggtttggagagtgaaggaaggtgaggggtttttttttagtaatattgaggttttagatgggatattttattaggtggtaggttgtgtttttatagatagagattttttaagggtagggtttagatggttttatttttgtgtggtttgatataaagtaggttttttagagttgttgagttttgggtttgttagtggtagagttttttatagttttttaagtttttatagttttttattttaggaaatggtgttattatttatttagttgtttaagttaagtttttgggtattattgttgattttttttttttttttatttttagtatttaaattatggtgtgtttttatttttagtttttttgtgaattagtttgaattttttttttttagtagtgtgttagttaatggttaataattggttatttggggttagtaaaagtaataatatttagttttttgatttgtagtgtttgtttatttttgtggtgttaatatttttgttttggttaattttttttttttttttttttttttgatagggttttattttgttatttggtttggagtgtagtggggtaattttggtttattgtaaattttattttttaggtttaagtgatttttttgttttagttttttaagtagtttggattataggtatttgttattatttttggttaatttttgtatttttattagagatgaggatttattttgttggttaggttggttttgaatttagatgatttgtttgttttggttttttaaagtgttgggattataggtatgagttattgtgtttagttggttaattttaagttatttgtatgatattattggaggtgagattgagaagagatgtttagttattatgaatatagtgtttttattatataaatataattttaagaatataattgtaataggatagataatagttaaatgttgtaaaaaatttaagaggtgatgaaagttgtgtatttattattttttgttttaaatataattatttataagtaattttttaatgttttgtttaattttttttttataatttgtaatttaatttatattgtaaaaatttattatttttttaatagagtaatgtatttttattgtgataaaatatatgtaatataaaatttattatttttggttagttattatggtttatgtttgtaattttagtattttggaaggttaaggtgggtggattatttgaggttaggagtttaagattagtttggttaatatggtgaaattttgtttttattaaaaatataaaaattagttgggtgtggtggtaaatgtttataattttagttttttgggaggttgaggtatgagaattgtttgaatttgggaggtggaggttatagtgagttaagattatgttagtgtattttagtttgggtgatagagtgagattttgttttaaaaaaaaaaaaaataaaaataaaaaagataaatttattattttaattaagtttttatgttagtgatattaagtatatttatattgtatatttattaatattatttatttttgaaattttttttaattttttaaattgaaattttgtttttattaaataataattttttattttttttttttttagttgttggtaattgttattttaatttttttatgaatttgattttatataagtgaaattatataatatttgtttttgtgagataggtttatgtagtatgaggtttttaaggtttattatttaaggtttatatgtagtgatagaattttgttttttttgaaggttgaatgatattttattgtgtgtatatatattttgtatatttattttttttatatttgagtaattgagagtaaagttgttataaatatgggtgtgtaaatatttgtttaagtttttgtttttattattttattattattattttatttattattagtattattattattttagatagttttattttgttgtttgggttgtagtgtagtggtgtgattttggtttattgtaatttttgttttttagattggagtaatttttttgttttagttttttgagtagttgggattataggtatttgttattatgtttggttaatttttgtttttttagtagagatggggttttattgtgttggttagggtagttttgaatttttggttttaagtgatttattttttttagttttttaaagtgttgggattatagatgtgagttattgtgtttagttattattttagttttaaatattatagtaatttttttattgttttatgagattttttgagatagtggttttagggattttatatatatttgtttgattttgtgtaatgataaagtgtagttttttttgtagaatggtagagttgggagatttttgatggggtatgagtttaaaggggtagaggggatgtttagaatatatatggattttttatgtgtgttttgttagttattaagtagatttgttttagttttgatatgtttaggattatagatagtgtatggtttttatttgggttaagtttttggaattttttttttttttatattatttgtattgggagtagttattaggttgtggattattaagttttttttaggttatttgagtttgtatttttttatttagtttgattgagttggtgtgtagttattatattttattatattttttgtttggttgttttaatgtaattataaggttttatttaaagaagtatatgattaatttgttttttagattttttagtgatttttttagtttgttttgtgtagaatatttatagtaaaatttgattatagtggtttgagtttttatttttaaggtaggggattttttaaataaagtattagtgttttaaatttatgattttttaaggaggtttttggtttttagtatagtaaatgttttgttttatggttttttggttttttatttttattttatttgagttttttgttttggtatttgggattgaattagtttggagttttttagttttgttgtttgttggttttgatgatattattagggattgtagtattgtttggattttttgttgttatattttattgtaataatatttaatttgatggaattttgggagtaagtggtaggggtagggatggtggtggttaggggttgtatatatataggatagaaggattgaaggattgggtggaaagtatgatttttttaagatgatttttttttagtagaattttggttgtgttttttgaatagtatttgtttatttgtatatttggtgagttttgtgattagtaaatttagatgtttgggaggttattagtggttttgttgaggtataatttagatatgatagtttatgttttttttttgatttttttttttttatatagttttatgattagagtgttttttttatttttgtttttattttagttttgtaagatatagttgtgaaatggttaaagtttttaattttttagtatttgtttgagattggagtataaaaatgagatggggatatagtattttatggatattagtgatggaaaaaaattttttgatttttttgggagttttgtaaagttatattaggggataagaaggagtggttagtttggtattgatttagttttaaagtagttagtgattaaagtatatagttggtatttttttatttttagggtattaggaggtttggttagaatttatgttagttaggagaaataggttgtttttggggtttttggtgttttggtttttttattgtttttttgaagaaggtattttgttttgtggggtttgaggttggaggtaatttgttattgatgtagtgtagggatgagggttgagttattagtttgttttagttttatgttagtaggaataatagggatttaagtagagaagaaagtatttatttttaaagttattatagtgattgaggtgatgtggtttttagggagtttttttttttgttggttttttgtggattgtggttttatgttttaataatgtttttgtttattttgtaaggtttagtaggtggaaggaaagagggtggaggttgggagtggtggtttggtaatttgggaagggtagggagtaggaatatgtttttttttttttgtatttgtttagaaggttttatagggtttgttttgttatttataattttagggagatttttttttaatgtttgttttataaatgtttatttattttatatttgaatatttttagttatagggagtttagtatttatttatgttatttattttatttttggttgtttaaaaaagaggaaagagagagaaagaaaagataggaaagatagagaaagggggaaagagagagagaggaaagaaagaaagaggaaagaataagataggaaggaaagaaaaaggaagggaatggaagggaaggaagagagggaagaaagagagaaagagagagaaagaggtataaataaggtaggttttatggagtagagatttaataagggagtaaaatatatttgtagttaggttgtagatggatttttataggagtgtatatttattttattttttttggaatagaaaagtggaaagaagatgtagtggtgtgggtgggtggtggttttttttgggggtttggaatgtggggtattagtttttttggttttgagaaggagattaagattattaatatttatagtggagattgaattatataagggttggggatattgttttttttgtatttttaataaagatttgatgttttaattatgggaatttgtggaagaagaaataaaattggttttggggttttttagagaattggttttttatttagtggtggttgtgaagaaatttttggagttagttttagtggtttgggtttgtatagttgagattgtttttggaagttgagtggaagtggggagtttttaggtatagttgggttttgttttttattttagttagtagttttaggatttttgggtgttttagagttttttttagagggtaaatttagagtatgagggagtggggagatgtttaatattgggggatttttgtttgtttttgtttttagttttgttgatttgaatagggaggttatgggtgtttaggggtagaattgtgggttggtaagtttttagttttggtttttttttgtttttttttttttattgttattgattatttttggttatatgttgatatttttataggatgatggagaagagagaagaggaatttttttgttttgtttagtatattttaaagaggttttagtgtaaaggtattgatgtttatagttaaatgtgtgtgggggttttttaggagtgggatgtttttattttgttttagattgttatgaattgatagaaggttttatgttattaaatatattttattaataaattattttaatatttagtaaaaaaataaataaaaatgtatgtattttgtgttttgtagtgtttttatgttgtatttttttttgtatttgagttttggtttgtgtttttggtttgttgttttgggaatagaatgttttgtgtgggaggtagataggaagtgtggggtgtgttggttgggtttttttagataatttggtattgttttttttagataatgaaattttttttattttgagtgtttttggaagttagttggtagttagattaatttaaatgaattatttgttttttttgtgaagtgattttagggatttaatgggtttgttattaatatagttttttttgtattttgttttttttttttatttttttttttttgtatgagttattggttatgatgatttggtttagttaagggatttggttagttttggttaggttatgtgagagatagtataaaggattaaggttgttggaattaggttagaggttgagggttatatggattttttggagtgtttgtaattggggatttttaaggttgttttttggttttggggatttgtttatttggggatagttttaagggagatttttaaaagtagggagttaaaagggtgaattaatatagaaatattgagggttagggagaatttgaagatgggtttggttgggtatagtggtttatgtttgtaattttagtattttgggaggttaaggtgggtggattatttgaggttaggaatttgagattagtttggttaatatggtgaaatattatttttattaaaaatataaaaattagttgggtgtggtggtaggtgtttgtaattttagttatttaggaggttgaggtaggaggattgtttgaatgtaggaggtagaggtggtagtgagttaagattatattattgtattttagtttgggtaatagagtgagattttattttaaaaaaaaaaaaaaaaaaaaaaaaaagataggtttaaggtttggagagttagaagttatttttttatttttgggtggtttattttgagattgtattatgttagagaaagttgtgggagtgtttgtttataatttataagtaatattgttttttttttttattagtttttggttttagtaggtttttgatttgtgttttttttagggttttgggtttttttaagttggatttttggttgttggtgggatgattatgtgatttgttatttttttgtttattgttttgggtagtttttgttatttggtgtatatagagtggagtttagtaaggttggggttgttgattttttgttagttatatttgtttttttttatgttatttttttttgttttggttatgtttaggggtttatatttttttataagttaggtgttagatttttgtgtttgttttattttgttttttttgtttggtgggttttttatattttttttggtttgatttaggtttgatttgtttttaggttttagtttagaggttgttttttttaggaagtttttttgggattgttagatgaagggatttttttttggattttttttttatttttatagttttaggaatagtttttaatttaggttttattgagttagtgtggtatttaggagagttataagtgtgtgatgaatgtgttgaagtttttttaaaagttgaaggagttttgtgaatatatagtagtattagtttagattgtgaaggtataggggagttagttttttttagttttgtttgtttttggttttttttttgaggaggtgggagttagttagttgggattaggaggtgggttttatggagtagagatttaataagggaataaaataaattagagaatttttttgttgtaaggaatttagataaggagtatttagttagaggaggaaggaagagattggtagtagattttttttgttttagtagttttgtaagttagatgggttaattttttagtatagttgttttttagtatagagaaattttttatttttagtaatagggtgggaatatttttagatagggttatggttattttggttatagggattatggagtttgagtttttgtggtttgttttatttatgtggttatagattttgagtatatatttggagttatagagtttaaagggtagggtagggtagggaatttgtttgattggtgaaggttattttattatttggagtataggtttttgtttttaaatttatatggagtttttgatatggggtattgattttaaggaggtgaatgtggatatttaaggttagtgaatggttaggtgttaatatattgataggtttttggttttttttttaatattgagggtaggaaataaatggggtttatatggtgtatatggtttttagagttagtaaggtgtgtaagatttggtagttgagaaaattgattatttggttgggtgtggtggtttatgtttgtaattttagtattttgggaggttgaggtgggtggattatgaggttaagagattgagattattttggttaatatggtgaaattttgtttttattaaaaatataaaaaattagttggatgtggtggtaggtgtttgtagttttagttattttggaggttgaggtgggagaatggtgtgaatttgggaggtggagtttgtagtgagttgagatagtgttattgtattttagtttgggtgaaagagtgagattttattttaaaaaaaaaaagaaaagaaaagaaaagaaaattgattatttgattatgaataagttagaatatttatttagaaaaaaaaaatagttttgtttaattggggatttaaaattttaggatttatgttttttttttatagagttatattatttttttaatgtttatttttgattttatttgtttgttaagttttaggtatttagaatatagtatgatagtaagttttgtgatttttataggtttttttaatttattttaggtatagttatatttttagttttgagtagtagggagtgatatgtagatggttatttagatagagaaagatttttaaaaggagggtaggttttgttttgtaggtagtatttattgatatagatattagtaggtaaattttttaggaagatttttattaagaaagaatgaaagaggtttagtgtggtggtttatgtttgtaattttagtattttgggaggttaaggtgggtggattattttaggtaaggagtttgatattagtttggttaatgtggtgaaattttatttttattaaaaatataaaatttagttggatgtggtggtgggtatttgtaattttagttatttgggaggttgaggtaggagaattatttgattttaggaggtagaggttgtagtgagttaggattatattattgtattttagtttggggggtaatagagagagattttgttttaaaaaaaaaaaaaaaaaaaaaaaggatgaaagataaataaggttgaaattggtaggttggtatatttttaataatttattttaggttgggtgtagtggtataatgttagtattttgggaggttgaggagggtagattgtgaggttaggagattgagattattttggttaatatggtgaaattttgtttttattaaaaatataaaaaattagttgggtgtggtggtgggtgtttgtagttttagttattttggaagtttaggtaggagaatggtgtgaattagggaggtggagtttgtagtgagtggagattgtattattttatgttagtttgggtgatagagtgagattttgttttaaaaaaaaaaagaaataaaaaataaaaataataaaaaaaaaataatttattttagtagggagtaggaggtaaggtttgatatgtagtgtttgttaatttttgtggtgtaaatatatttattgtggtaaattttaagttataaataggatattattaaatatagagttgggaaaagatatgtatattattggataaaatgtttaggtagttatggtttatttttttttgggaaggggggtatgtttagaatgttttttattatggagaatgattgtggtaaatagggtttaattggtaggttgatttaattaattgtttattgatgtgatgtggggtaggtttttgaggttgtttttatgtttagggaagaaggtggttatgtggttatagatttggttttgggtttgttttttttttttttttttgagatagagttttgttttttttttttaggttggagtgtaatggtgtgattttggtttattgtaatttttgttttttgggtttaagtaatttttttgttttagttttttaagtagttgggattataggtgtttattattatgtttagttaattttgtatttgtagtatagatggggttgttggttaggttagttttaaatttttgattttaggtgatttatttattttggttttttaaagtgttaggattataggtatgagttattgtgtttatttgggtttgttattttgaggatatatttggagttatgtgtttatgattttttttttattttaaaattttgattttattttattgtttttagagataggttttgttttgttatttaggttggagtgtagtggtgtaattatagtttattgtagttttgaatttttaggtttaagtgatttttttattttagttttttgagtagttggggttgggtttataggtgttattatatttagttatattttatatttttttgtagagatagggttttgtaatttgtttaaattggttttaaatttttggttttaagtaatttttttatttttagttttataaagtgttgggattatagatgttagttagtgtatttagtagttattatgattgattggtgatgtttgttttagttttaggatgaaagagtagtagtattttagttaagtatttgtggtttttgattggaagatgttttttttgttttttaagtatagtgtaaatgttatttttttggtaagtttttttttaattttattttttttttggtatagggtttgttatagttttgtttatataaagagagttattagtgtatgtggtatagatgttagttgtttttttaatatttgagtttttttttttttatagtaattgaagttttggttgtgtatagggaagtttagttgaagaatatattgtttagtttttttgatgataggagtggttatataattgggttttggttagtgggaaggagttgaagtgtttaatttttaggttatgtttttaaaaataaagagggatatttgttttttttttttttttttttttttttttttttggttggagtgtagatatgatggtaggagttggaattattttagtttaagagatggaagttgtgtgttgaggatgtattaaaggaatgaattaggtttgggttgttttgggtttttataatgattgatatttggattgggatgtgggtttgagtgttgtttagtttttgatgttttagtttttgttatatagttagatggtgttttgattaatttaaggtatggttattattttatttgtttggtagggtaggggttttatttttatatgttgagtttttggtagaatttggtgtaatatatatagttaaagtaaaatgaataggttattttaattaaggtttattttgtgggttggttttggtatttggttttaatttttattttattttatttatttattatttttgagatagagttttatatttgttgtttagtttagagaggagtggtgtgattttggtttattgtaatttttattttttaggtttaagtgatttttgtgttttagtagttgggtagttgggttttttttgagtagttgggattataggtgtatgttattatgtttggttaatttttgtattttttgtagagatggggttttattatgttggttaggttggttttgaatttttgattttaagtgatttatttgttttggttttttaaagtgttgggattataggtatgagttattgtgtttagttagttttggtatttggaattggaaaataatagtttgagttttagaggggataaatataaatatgaggtagaaggaatagtaagtaaatatgtgtttagagtaggttgggttgtttatatttttaaaatattgttaggtgttgaggtttgggttttgtgttagatttttgggtgtagattttgtggggatatttattgggtagtgggatttttggtaagttatattatttttttgagtttttgttgattaagttgtttattgagaataatatttagattgaaaggatttataataatatgtgaaaagtgtttggtttaaaataggagtttggtaattggtagtttttattatttataatatatagtttaatgtttttgttttataggaatgaaaataggatttagataggtaaaatgatttgttgagggttgtatagtgttaatgatagagttaggattagggtttggggttttgattttttttgtagtattttggttttgtgagaagtggttttgggtgaatataaggagtgaggagttggtgagaaattttgaaaatgaagttgggtgtggtggtggatgtttgtggttttagttatttaggaggttgaggtaggaggattgtttgagtttgggagttggaggttgtagtgtgttatgattgtattattgtattttagtttaggtgatttagtaagattttattttagaaaaggaaaggaaaggagaggggaggggaagggagggaatttttgatagtgattttagagataattaggatgatttgaaattattttgaaatgtattaaaaaataaaaataaaatggatttatggttaggtgaaggagggatagatggatggtgaggtgataaagtaggtgtagtttggtgttagtggtagaatttaggtgatggttgaatgtgttttttgtaaaatgtttttaatttgattatgtgttttgaatatttttataatagaatggagggaagagaaaggtaagagggagttattgtagttgttgtagtaggagtagattttaaaatattatgtattagatttttagttttgtttttgtggatgtgtttttgtttttttttttgggatttaaggatatttaatgagtgtatgtgtttttaagtttttttgtttttttatttgtttttatatttggaagattttataggtggtgtgggttagttttttattttgttttttgtgtttttagtgtatgatagatattgagtgagtgttagtttttttttttgatattttgtttgtttgtttagagaggtttttttatagtttagttattaggttgatgtttttggatgtttggttgatagtttttttagttgtgttttagtgatttggtaggtgttttgagttataaataaggttattagtggatgtttttaaagttttttttattatggtgttttttttttttttattaatagtttgttatgatagttagtttgtatgagtttttttttagggttgtgttttttgaggttgtttagtgtttggtttgttagagtttattagatagggtgtttattttttttaggtttgagtttttatttagagaattatttatagaaggataatggagaaaggtagttggggtattaaatggagtgtgtttgtatgtggggggggaggggagggggagggaaagtaggaagagaagatataagaggagaaataagaataagaggaaatatagaaggaggaggagtagttttttttatgggggtggattttgtgtttagttttttattaaggatattatatttattattttgtttggtttttatgaatatttttaaggttgtttttttttggtttttatttttttattaggaagtggaggtatagagtgagaaagagttgtttaaggtttttaggtagtttatggagttattgggagttatatttaatttgtttaattttatgtttttgtttttagttattataataaattattaaggttttatagttataggagtttagtttggagtttttattgggttttttaaggtagggagatggggttggaggttatgttaggtgtatggtgtttagagttgtttaggaagttttgtggtgtgggttgggtattaggtagtgtttgtaggatggagaaatgaatgaggttgagatatagtgttgttttttttaaatgtgattttttttgagtttttgtgattggttatttgagagggtagttttggttttttggtgtttatgtttgggtttagagatgttttttttagttaggtttttttttgaggatggaaatttagaattttattataggaggaagagttgggagtattttattttttttttttttttgagatggagttttgttttgttgtttaggttggagtgtagtgatgtgattttggtttattgtaagttttgttttttgggtttatgttatttttttgttttagttttttgagtagttgggattataggtatttgttattatgtttggttaattttttgtatttttagtagagatggggttttattgtgttagttaggatggttttgattttttgattttgtgatttgtttattttggttttttaaagtgttgggattataggtgtgagttattgtgtttggttagggagtatttttaagatttttgtggagggttgtttaggtttaagttttttattatggaaggttttttagatgtggtagttatggtgtatgggttgagggtttttatttattaagaagtaggagtatttgatgtatatttagtttatgatttttatttatttgggggttgtgtttgtagttatgtgatataagggaatagttatagtagtgggttataaagagagtgtgggttaatgtgtaggggtagaattttgatagttttttatgggttggtagtagggaggggtatatttgtataaattttatatgtatagttttttatatatatgtggttgataattatttatatatttaagatgggatttggtgtatagtttattagtaataggtgttggtaatttttagttgtttttttgttgtggtgtagatattatttaaggtgggatggagagagttattgtttttaaggttatatattttaaagggagatgttgggttatggaatgaaaataggaggattagttagagttattggttttgagttatataatgggatatataggtttatttattttatatttttattgagtaattataatgagttaagttgtatagattatttaaataattggtatgtagaaaagtattttaatttttttttggttttgatgtgatgggaagaatttggatttttggagttatagagttggatggaaattttggtttagttaattattggttgggggagtttgggtaagtgatttaaggtttttgagtttgtttttttgtaaaagagtagtgtttgggtttgttatgttaggttagggtaagatgattgaagagtaagtgtttagtattggttaggggttaatgtttttaaggatgtaaagtgtaataagtaggtgttatgattgtattgttttttattgtttgtggtaaatatataagtaaagatggttttgtgtttgtgttgggggaggtagggaattggttttaggaggatgttggtttttttagttgttttttttaaagttttttgggaggagaaatgatttattttagttgttgggagttttaatttataagtaggtttgtttatttggtagtggttgtatgtaggtaggaggggttttggtagtttttaagagtgaggggttgtttagtttttttttagttggaaaggaggttttaggttgggtaggagtatttggggaaatttagtttttggagttaggttatattagggagatgaggttgttagaagtttttttggtgtttatagtaaaatataattaaagtgggatttagattttaattagtttaaggtttgatttatattagagggaaattagtgtttgttgtatgagtgagtgtttatgtgtgtgtaaggtagagatagattttgggtaagtttttttatttttttatgtttgtttttttatttataaaatggggtaatattatttattttatagggttgttatgaaataaatatgtattaatatttgtaaagtgttgagaatagtatttggtataaaataagagtgatagatttgttaaataagtaaaaaataagatataagtttaaagtagagtttggtatattgtgagtattaagagttgtgttttttgattttttttttttgtggagatttttttattagaagtgggagggattgttgaggttggagttttgttttagggatttttgtggggagttttttagtttagagggatttgttttatggattatatttgttttgggtttttgtgtttttgtgtatgtgtgtatatatgtgtgtatatatatgtaatgtgtgtgtgtgtatttttatggatttgtgataatttgtatatatatgtttagaatttatttgatatagtgttttattaagatgttggagttttgatgaatggattgtggggttgagatattgtttttataggaagttgttttagtagtaagttttttggtttttatagataattaaaaagaatggagtttgtttttattttttgttttaaaaatgatgtatagtgtgtggggtttgatgttggaggtttttttagtagatatatttttaataatattatattttgaaatttaagttgttgtaaaataagataagtaaagatggtattggtagggatttttgaggttttttttatgtatttttgaataatttttatatggtttttgtttgaatgtttttaggtatggggaatttattattttgtgaaatagtttgttttattgtttttaagtgaatattgtgagaaaaatatttttttttgtaaagagttaagttttatttgttagtattttttaggtatttggtattagttttatattttgggggaatttaaaataaatgttttttttttattagataatttattaattatttggagatagtggttgtagttttttgttttatgtagttattttatttagtttttttttggaatttttgatgtgaatataagtttttttgttatgtaggttttttttttgggttttttatttatttgtgtatattttggagaggttgtttgttttgtgggtgagatttattgtgggttgaattgtgtttttttaaaagatatatgtaagttttgattttttagtatttatgaatgtgattttatatggatatagggtttttgaagatgtaattgggttatttgagggtatattgaattagagtgggttttaaatttaatgataggtgtttttataagatagaggtaggttgggtatagtagtttatgtttttaattttagtgttttgggaggtaaagttttattgtttgagtgtaggagtttgagattagtttgggtttttgtttttataaaaaaattaaaaaattagttaggtatggtggtgtgtgtttgtgttttagttatttggaaggttgaggtgggaggattgtttgagtttgggaggttgaggttgtagtgagttatgattatgttattgtattttagtttggaggatagaatgagaatttgtttttaaaaataaattaaaaagataatagagagggtagtttggatagagatataagaagagatatagggtgaaggttaggtggggggtaggttgagttgtaagttgaggaatattaggggttgttggttgttgtagagtttggagaaaggtatgggatagttttttttggaatttttaggaggaatgaatttttagatattttggtttgggatttttggttttagaaattttagggaagatattttggatgtttttgtttttgtttttgtttttgtttttgagatggagttttgttttgttatttaggttggagtgtaatggtgtgattttggtttattgtaatttttatttttaaggtttatgttatttttttgttttagttttttgagtagttgggattataggtatttattattatgtttggttaattttttttttttttttgtatttttagtagagatggggttttattatgttagttaggatggttttgattttttgattttgtgatttaattgttttggttttttaaagtgttgggattataggtatgagttattgtatgtggttgattttggatgttttgagttattttatttgtggttttttgttatgatagttgtaggatagtaatatagggttttagtagggtggtttggtaagggttttttttttatggtagtttttattttgttttatttgtagggttatttagatgtttattttggttttggttagtaagtgttagtgtatttttttatgtttagtagtaagggtagtattgttgttgattaagtatttgttatgttggggtttttgtgtggttttggggttttttttttttgtttatatttggtagtttagtttttttttttgtattttatttgatgttggggttttgggtaagtttgggggatttgtgttttattttatagattttttagttgattttattagtttttgtatagggtttgtttgaagggttgttgggttgggtgttaattagagtttttagtagtagtttttttggttttttgattttggtttatgttttaggggtagggtttttaagggttttggggttgtttttgaggttagtttttttgttgattgtagtttatatagaggagggtttaattttgagtgtggttgtttgtgattttgagagatgtttagagttgtagatgtgttttttaagttttttagagtttgggataggagttatttaatgtttttagtgttataggtaaaatttgttttttttaatataaattgtttttagttttatttaatgttttttttaatgagtagtaataaaaatatggttttttgttaaaggtggggtttatagttttttagaatttggttttttgttaggtttaggtataatttataggagtgtttgtttttgatttgtgtgtgtgtgtgtgtgtgtgtgtgtgtgtgtgtgtgtgtgttgtgtgtatgtgtatatgtgtttgtgtaagtttttttatgtgtagttttgggaagggtggagaggtttatggaaattttttttggtatttagtaagttagaaaaaaggaaaatgagatttgtgtatatatgtgtaagtgtatatatagtatataggtatatatatatatatatttagtatatattatataggtttatatgtgtatatatgtgtaggtatatattatataggtttatatgtgtatatatatgggggtatatagtatataggtatatataggtatatatatttttttgtaggaaagtttttttttgttttttattttgtagggtttttaggttttatgaaataagattgaattttggaagtttgataaaaggtttgtttggagtattttggttatttttattagtttttttagttgtggaaggtatgttttgtggtatttatttattttttgtttttatttttatttttgtttttgtttttttttttttgtttttttagtttatatgttgtttgttttaattttaatttttgtatttggatgggaattattttttttgtagaagggtgtaatgtatgtggggatatatatatatatatatatatatatattgtattggaggagagaagagaggtagagttttttttagatttagagttttagtgagtgatgggattttttttagagaatatgtgtagaagtttgtgttattggaagaagatattattttgatttatattttttttttttttttttgttttttttatagagaaggaaaggttttagtaaatagtggttatgtgggttttttgtatgttattggtagttttttagttaggattattttttttttatttttggaagtataagaatagagagaagggtgagtttttgtttttgggggtttttttttgtatttttttggagttaattttagggttgtgggttgtataggaaggagggtttaataggttttttgtttaattttgtttttttagtgaggagttgatttattttgtttgtaaaagatgttggttgggatttgatgttgggtaatttgaggagaagagaagggggataggggttgaggttaggtttttggttttgaaatagttataatttttggggtagagtttaagggtgttaggttggagattttatatttggttagttggtagttattattttggtttagttagtggtttagggtattatagttatttagattaggaattttatttttttggattgtattaatgaggaaggttgagtttgtaggttttatatatttatggtaattttaaggtagagaggttattgttaattgagggttatgggtaggagttttgtgagtttattagtaagtttggaagattaaggtttttggttatagagagtagttgttatttggttaattttgtagaaaatattatagttttggataaaatatttgaaagaataaaataataatagtttggagttagtatagaatattttaagtaggtagaagttggagtagagtttatatttgatagaggggaataaaattagataagtttttggtttttggaggtttttttgtttagaggtaggtattgagtaattaaatttggataaaaagttttaaaagtatttagggaaaaataatatgtggtttataggggaatagttagatgaatgttgattttttgatagaaataatggaggttaaagatattggaattttatattttaaagttttgaaagaaaaaattgataatttagaattttataattagtgaaattatggtttaagaatgatagtaggttgggtatagtggtttatatttataattttagtattttaggaggttaaagtaggtagattatttgaggttaggagtttgagattagtttggttattatggtgaaattttatttttattaaaaatataaaaattagttgggtatgatggtatatgtttgtagttttagttatttgggaggttgaggtaggagaattgtttgagtttgggaggagaaggttggtgagttgagattgggtaggagttttgaaattatattattgtattgtagtttgtggggagatagagtgagattttgttttaaaaataaaaataaaaataaaaaaagaaagaatgatagtaaaataaagatttgtagataagtgaaaatgaaagggaattagttgtttgtaaatttgtattataaaaattgtgaagtaagttttttaagattatgggaaatgagattagatgggaatttagttttttaggaaggaatgaagagtataggatatagtaaatatatgggtaaatagaaaagattttgttttatttttaatttttttaaaatgtatggggttgtttaaagtaaaaatttttttattgtattgtttagtttataatgtgtatggatgtagtaaatatttaataattattatatataggatggaaagtggtaaatgaatttataggattgtttagtttttatattttttttttatgaagaaaaataatgttaattttaagtagattgtgaaaagttaagaatgtgtaatagaatttataaagtaattattaaaatagtaatataaagagatataattaaaaagttaaaataggttgggtttagtggtttatgtttgtaattttagtattttgggaggttagggtgggtggattgtttgaggttaggagtttgaggttagtttggttagtatggtgaaattttgtttttattaaaaatataaaaattagttggttgtggtggtaggtgtttgtaattttagtatattagggaagttgaggtaggagaattatttgaatttaggaggtagaggttgtagtgagttaagattatgttattgtattttagtttgggtaatagagtgagattttgttttaaaaaaaaaaaaaaaaaaaaaatataaattaaaatagaattttaaaaaatatttaattaatataaaagaagttaagaaagtaagatgaaagaaataaatattaaagagtaaggtagtagttttaaatttagttatatttataattatgttaaatagaaatagtttgaatattttaattaaaaggtggaggttgttagaatgaataaaatagtaagatttaattatatattatttataaaagatgttgttttagtataaatataggttgaaattttttgtttggaaaaagatatattgatgttgtttgaatgatgatggagttatgttttgataaatttattataagtggaaaataaatattattttaaaaatgtatttaatatatttaatttattgaatattttagtttagtttagtttattttaatatgattagaatatttattttagtttatagttgagtaaaattaataaatataaagtttattttataataaagtgttgattattttatgtaagttattgaatattgtattgaaagtgagaaatataatggttttatatatatttaaagtatagtttttattgtatatatattatgtttgtattatggtaaagttgaaaaattgtaagttaaattattataagtttttttataagtttttttagtttttttatgtattttaaatagtatgtttaagaaggttggagaggttatataaatattaataaagttgagtttaagataaaattattatgagataaaggaatatatttattatggttaaatgattagtttattgagatattattataattataaatgtgtatgtatttaattaaaggagttttaaaatatatgatataaaatttgaaagaattaaagggagaaatgggtaattttataattataggtggagattttttttttttttttttgagatggagttttatttttgttgtttaggttggagtataatggtgtaattttggtttattgtaatttttattttttgggtttaagtgatttttttgttttagttttttgagtagttgggattataggagtttgttattatgtttagttaatttttgtatttttagtagagataaggttttattatgttgtttaggttggttttaaatttttgattttaggtgatttatttgttttggttttttgaagtgttgggattataggtgtgagttattgtgtttggatgtatagttggagattttaatattattttagtttatttaggatgttaaaataaaatgttttaggttgggtaatttataaatagattgtagtgtttatagttttagaggttgggaagtttaaaattagggtgtttagtgtttggtgagagttagttttttgttttagagatgttttttttttgttgtgtttttatatggtagaagggattaattttatttatgatgattttgtttttatgagttaatatttttttgatgttttaatttttaatattattgtattagagattaagttttaatatatgaattttgggggatataaataggtaggttatagtaaatattatttttttaatatttgagaaataagtattagataatttgaagaatattggtaattagtaattgatttaattagtagttataaagttttatatttaggaagtttagaatatatatatatattttttttttaagtgaaaatagtgtatttattaagatatatattttgggttataagttttaaattttaaaagtatgtaaaatatgtttgtttggttaaagtaagattaaattagaaattaatagttttaagatatttagaggagttttgattatttgtaaattaaataatatatttttaaataatttatgagttaaagaggaaattataagaaaaattttataatattttaaatgaaatgataatgaaaatatagtatattaaaatatgtaggttgaagttagtgtttagagggaaattgtaagtgtttatattagaaaagaagtaaaaaaaaaaaaaaaaaaaaaaaaaaaaagatttaaggatttgttttaagaatttggaaaaatgggttaggtgtagtgtagtttatgtttgtaattttagtattttgggaggttaaggtaggtggattatttgagattaggagtttaagattagtttggttaatatggtgaaattttgtttttattaaaaatataaaaattagttgggtatggtgggtatttttagttatttagaaggttgaggtaggagaatggtttgaatttgggaggtggaggttgtagtgagtttagattatgttattgtattttagtttgggtaatagagtaggatgtttttttaaaataaaataaaataaaataaaataaaataaaataataaaaaaaataaagaatttggaaaaatatgttagttatttatgtattgttttttaattttgtatatattttgttaggttttgttttgtgatattggattgaggttttatgagtttttttttttggttaaatatagttatgttaggttttatttataggggataatattgtggggagttgttaggttttgttgaggtagtagtttttttttttggttttagggttttttttttttttgaaggtatagttgttagtggtgtgtgtttagtggggtttgttttgtattgagtttttttagtattttagttttagtttaatgggattttagtaaattttttagatatttagtttttgtttatttatattttttagtaggttttttggttatttagtaagttgattttgtagatttattttttttatattttttggtaagaatttttttgttattagtaggttgtaggtttttgtggtagttatatattttttaataaggtttgaatgtaagatgtggtaaggtgtggaggatgttttgagtttttggttttttttttattaattttagtggtagtaattgtttttgtgtgtttgtatatatgttttaaagtatttattatagaaaatttattattttaattatttttaggtgtgtagtttggtggtatgaagtatatttatattgttgtgtaattattattattatttattttatttttttaaattgtaattttatttttattaaatattaattttttatttattttttttttttttagtttttggtaatttttattttattttttgtttttttgaatttgattattttagggattttataaaagtgaaattatatagtatttgtttttttatgtttggtttttgttatttagtatgtttttaaggtttatttatgttatagtatgtgttagaattttttttttttttttttttttttttttttttgaggtagttttgttttgttgtttaagttggagtgtagtggtatggttttggtttattgtaatttttatttttttagtttaagtgatttttttgttttagtttttttagtagttgggattataggtatatgtttttatgtttggttaatttttgtatttttagtagagatagggttttgttatgttggttaggttagttttaaatttttgattttaagtgatttgtttattttggttttttaaagtgttgggattataggtgtgagttattatatttggttttttttttttttttaaggtagaataatattttattgtatagatggattatattttgtttgtttatttatttgttggtggatatttgggttgtttgtattttttggttatgggaaaagtgttgttataaataagaatgtagtatatttgtttaagtttttgttgttagttttttggagtatatatttagaagtggaattattggatgttatggttattttgagtttaattttttgagtaattgttatattttttttatagtagttgtattattttatatttttattagtagtgtatggggttttaatttttttatatttttgttaatatttgttgttatttatgttttggttaatagttattttaaagggtgtgaaattatattttattgtggttttgatttttatttttttgatgattagtgatattgtgtatttttttttgtgttttttggttattggtatgttttttgtggaaaaatgtttgtttattgggttgtttttttttgttttgtggtttagttgtaggagttttttatatattttggatattagttttttattggatatatgatttttaaatatttttttttattttgtggattttttttttatgttattggtagtattttttgatgtataaaagttttaagttttggtgaagtttaatttattatttattttttttgttgtatttttggtgttatatttaagaaagtattgttaattttaatgttatgaagttttttttttatgtttttttttaaagtagttgttttttatatttgttttttttatattttttagagtttttttgtataaggtaaaataaattttatttttttatttttatttataatatttagtgttttagttttgatattagatgtgtggtttttttttgttgatttttaagtaattttttaatatttagtagtttttaattgggtgttttgtaatttagtttaattttgatattaattagagttagtgtagattttataggttaagggttttattttataagattgtttttaattttagagattagttgtaagtggtaagatattaggttatttataatttttgtttgatttggttataaatttgaggtttttataattttttttttaggtttaataatttgtttgagtgatttatagaatttaggaaattagtttatttaaaattgttgatttattataaatgatattttaaaggatataaatgaatagttaattggaagagatgtataagaaaggtatgaaggaagtggtatggagtttttatgggagggtatattgtttttttagtatttgtaggtatttaataatttgaaattttataaattttatttttttgggtttttagggaggttttattatataagtatgatatgaaatttttggttattgatgattaatttaatttttatttttttttgttttgtaggaggtggatgggaaaggttgtaagttttagttttttaattataaggttgggttttttggtaattagtttttatttttaggttgtttaggagtttttagttattagttgtttttttagtaaataaaaagatatttattattttggagattttaagagttttaggagttatatgttaaataaagttgggggatagagattagatagatagatagatagatagatagatagatagatagatagatagatagatagatatattgatttttgagatagagtttttttttgttatttaggttggagtgtagtagtgtaattttggtttattataatgtttgtttttttgggtttaaattatttttttattttaattttttaagtagttggaattgtaggtatatattgttatgttaggataattttttgtatttttggtagatatgaggttttattatgttgtttaggttggttttaaatttttgagtttaagggatttgtttgttttagttttttaaagtgttgggattataaatatgagttattgtattgagtttagtttaaatatattttttttatattataatgttatttttttgtgatttttttaatagttaattattttttatagttaagaatattttatattataagttgttatttaaattgttggtgtggtttttgttttttgattgggttttgattaatgtgttgaagtaagtataaggaaggaagtaatgaagataatagagaaatttaaggaaatggatattagaaaaggggagtttaatgttggttttttaaaaagatttagattgataattttttagttaggttgttgatgagagggagatggtgaatataaagttataataaaaggaatgaagtgttttttttatggattttattgatattatagtgataaggaatataggtatattttattttattgtgttttatagatattgtattttttataaattgaaggtttgtggtagttttgtattaagtaagtttgttggtattatttttttaataatatgttaatattgtgtttttgtgtaggagtttgatgatttttgaaatagtttaaatttttttattattattatatttgttatggtgatttgtgatttttttttttttttttttttttttgtttttttttttttgagatagagttttgttttgtttggagtgtagtggtgtgattttggtttattgtaagttttgttttttgggtttatgttatttttttgttttagttttttgagtagttgggattataggtatttattattatgtttggttattttttttgtatttttagtagagatggggttttattgtgttagttaggatggttttaattttttgattttatgatttgtttgttttggttttttaaagtgttgggattataggtgtgagttattgtgtttggttttttttttttttttttgagatggagttttgttttgttgtttaggttggagtgtagtggagtgtagtggtgtgattttggtttattgtaatttttattttttaggtttaagtgatttttttgttttagtttttttagtagttgggattataggtatttgttattatgtttggttaattttggtatttttagtagagatgaggttttattatgttggttaggttggttttaaatttttgattttaggtgatttatttgttttggttttttaaagtgttgggattataggtatgggttattgtgtttagtgattagtgatttttaatgttattattgtagttgtttttggggtatgatgagttatatttagataagatagtgaatttatttaataaatgttgtatgttttgattgttttattgattggttgttttttgttttttttttttttgtttaggtatttttattttttgagatttaataatattgaaattaggttaattaataattttataatggtttttaagtgtttaagtgaaaggaagagttatttgttttttattttaaattaaaagttagaaatgattaagttgagtgaggaaggtgtgttgaaagttaagataggtaaaagtgagattttttatgttaaatagttagttaagttgtgaatgttaagaaaaagttattgaaagaaattaaaagtgtgattttagtgtatatatgaagaagaagaaagtaaaatagttttaatgttgatatgaagaaagtttgagtggtttggatagaagattaaattagttataatatttttttaaataaaagtttaatttagggtaaagttttaattttttttaatggtatgaaggttaagagaagtgaggaagttggagaaggaaagtttgaggttagtagaggttaggttatgaagtttaaggaaagaagttatttttataatgtaaaagtgtaaggtgaagtagtaggtgttgatggagaagtggtagtaagttatttagaagatttagtttagagtattgatgaaggtggttatattaagtaatagaattttagtatagatgttttattttttattggaagaagatgttatttaggatttttatagttagaggggagaagttaatgtttgtttttaaagttttaaaggataggttgatttttatgagaggttaatgtagttgttgattgtaagttaaagttaatatttattgattgttttaaaaattttagggtttttaagaattttgttaaatttattttgtttatgttttagaaatggaataataggttttatttgatagtatatttgtttatagtatggtttattgaatattaaaaatttattgaggtttggtgtggtaatttatgtttgtaattttagtatttttgaaggttggggtggggggattatttgaggttaggagtttgagattagtttggttaatatggtgaaattgtatttttattaaaaatataaaaattatttaggtatggtgttatatgtttgtaattttagttatttgggaggttgaggtaggagaattgtttgagtttaggaggtggaggttgtagtgagttgagattgtgttattgtattttagtttgggtaatagagggagattttgttttaatttgaaaaaaaataaaaaaataaaaaagggttaagtatggtggtttatagttgtaattttagtattttgggaggttaaggtaggtaaattatttgagtttaggagtttaagattagtttggttaatatggtggtgaaattttatttttattaaaaatataaaaattagttaggtatggtagtgtatatttgtagttttagttatttaggaggttgaggtaggagaattatttgaatttgggaggtggaggttgtggtgagttgagatagtgttgttgtattttagtttaggtaataaagtgagattttgttttaattaaaaaataataataaaaaaaaaataaatagggtttggtgtagtggtttatgtttgtagttttaatgttttgagaggttgaggtaggtggattatttgaggttaggagtttgagattagtttggttaatatggtgaaattttgtttttataaaaaatataaaaattagttaagtatggtggtgtgtgtttgtaattttaattatttaggaggttgaggtataagaattatttgaatttgggaggtagaggttataatgagttgagattatgttattgtattttattttgggtgatatagtgagattttattaaaaaaaaaaaaaaattattgagatttattgtttaggaaaaaagaatttttttaaaatattattgtttattgataatgtattttgtgatttaagagttttgatggagatgtatgtaaagatgaatgttgtttttatgtttgttaatgtaatatttattttgtagtttatggagaagggataaatttgatttttaagttttattatttaagaaatatattttataaagtagtatttgttatagttagtgatttttttaatggatttgggtaaagtaaattgaaaattttttggaaaggattttttattttagatgttattaagaatatttgtgatttataagaagaggttgaaatattaatattaataggagtttggaagaagttgattttaatttttatggatgagtggtttaagattttagtagaggaagttattgtagatgtggtggaaatagtagagaattagaattagaagtggagtttggagatgggattggattgttgtaattttatgattaaatttgaatagatgaggagttgttttttatggatgagtagataaagtggtttttggagatgggatttattttaggtgaagatgttgtgaatattgttgaaatgataataaaagatttagaatattatattaatttatttgattaatttgtggttagggttgaaagaattgattttaattttgaaggaagttttattgtgggtaagatgttattaaatataatgtgtgttatagaaaaattttttatgaaagaaagagttaatttatgttaaaaattttagttaagaaattgttggttaggtgtagtggtttatgtttgtaattttagtattttgggaggttaaggtaggtggattatttgaggttaggagtttgagattagtttggttaataaggtgaaattttgtttttattaaaaatataaaaattagttaggtgtggtggtaggtatttgtagttttagttatttgggaggttgaggtaggagaattgtttgaatttgggaggtagaggttgtagtgagttgaaattgtgttattgtattttagtttgggtaatagagtaagattttgttttaaaaaaaaagaaaaagaaaaaagaaataaagaaattgttgttatagttatttttaatttttagtaattattatttggttagtagttattaatattgaggtagattttttattaagaaaaagattatggtttgttgaaggtttagatgattattagtattttttagtaaaaagatataatgattttatatattttaatagattatagtatagtgtaaatataattttttttttttttttttgagatggagttttgttttgttatttagtttggagtatagtggtgtgattttagtttattgtaatttttattttttaggtttgagtaatttttttattttagttttttaagtagttgggattataggtatgtgttattatatttagttaatttttgtatttttaatagagatgaggttttattatgttggttaggttgtttttaaatttttaattttaaatgatttgtttattttggttttttaaagggttaggattataggtatgagttattatgtttggtttaaatataatttttatatgtattgggaaattaaaaagtttgtgtgatgtgttttattgtaatatttgttttattgttgaggtttggaagtaaattttaggtatgtttgtattatgaataattttaaatgagtaaatttaataatttatttgaaagggataaatttttttaaagtataatttattaaaagtaagataaggggaagtaaaaaaatttgaataattttttttatatattaaattgaatttgtgattaaaaataaataattattttttttagtagaaaattttaggtttagatggtttttttggtggattttattaaatatttaaggaagaaataatattaattttatgaaaatatagaaaataaagagaagggaatatttttaaattaattttatgaagttaaaatgaggttgataaagatattattgaaataaattaataaataaagaaaatattatattaatattttttatgaattaatatgtaaaaatttttaaaaattgggtaaattaaatttagtaatatataaaaaggatgatattttataagtaagttggattttttttagaaatgtaaggttggtttaatattaaaaaattaggtttgtatagtggtttatatttgtaattttagtattttgggaggtagaggtgggagtattgtttaagtttaagaattgtagattagtttgagtaatataatgagattttatttgtataaaaaattttaaaaattaaaaattagtttggtatggtggtatgtgtttatagtttttgttatttaggaggttgaggtgggaggattgtttaagtttaggagtttaggttgtagtgagttatgatggtattattgtgttatagtttgggtaagagtgagattttgtttttttaaaaaaaaaaaaaaaaaaaatggggggtaaaaattaattattgtaatttattttattaaatgaataaaagataaaataatgattatttttatagatgtagaaaaagtatttattaaaattatatttatttatgttaaaaaattttagtaaattaagaatagaagggaatttttttaatttgataaaggttatatatgataaatttaaagttaatattataagtttggtataggtaaggatgtttattaattattattatttaatattgaattggtagttttaattagtgtaataaagtaagaaaaaaaaataaggtattaagattagaaagaagtaaaattatgtatttaaattttaaaagatttataaaattattattagagtaataaatgattttggaaaagattataggatataagatttatatataaaaatttattgtatttttatatattagtagtaaataattaaaaatgaaatttaaaatttattttagtttaaaatagtgttaaaagtaaaatttttaggaataaatttaataaatggtatgtaagattttttttttgaaaattataaaataatgtaattttgtagagatttttttttagtagagaaataaaagaaatataaaaggatttttaaaatggagatatattatttatataaaagatttaatattgttaaaatgttaatttttttttaattgatttatagatttaatataattttaattaaaatttatattgtatttttgtagatattaataagttattttttaaatttataaggaaatttaaaggatttagaatatttaaagtaatattttagatatttgagagattttatattaagatttattgtaaagttatattaattaagatgtggtattagtaaaggaatggataaaatattaagaaaatataatagtgttttaatatagggtttatatgtatatagtatatatattaatataggattatatatatagttaatataggatttatatgtatatagtatatatattaatataggattatatatatagttaatataggatttatatgtatatatgtatatatattaatataggattatatatatagttaatatggggtttatatgtatatatgtatatatattaatataggattatatatatatatatagttaatatagggtttatatgtatatatgtatatatattaatataggattatatatatagttaatatagggtttatatgtatatatgtatatatattaatataggattatatatatagttaatatagggtttatatgtatatatgtatatatattaatataggattatatatatagttaatatagggtttatatgtatatatgtatatatattaatataggattatatatatagttaatatggggtttatatgtatatatgtatatatattaatataggattatatatatagttaatatagggtttatatgtatatatgtatatatattaatataggattatatatatagttaatatagggtttatatgtatatatgtatatatattaatataagattatatatatagttaatatggggtttatatgtatatatgtatatatattaatataggattatatatatagttaatatggggtttatatgtatatatgtatatatattaatataggattatatatatagttaatatggggtttatatgtatatatgtatatatattaatataggattatatatatagttaatatggggtttatatgtatatatgtatatatattaatataggattatatatatagttaatatagggtttatatgtataaatgtatatatattaatataggattatatatatagttaatatagggtttatatgtatatatgtatatatattaatataggattatatatatagttaatatagggttgatatgtatatattaatataggattatatatatagttaatatagggttaatatgtatatatgtatatatattaatataggattatatatatagttaatatagggtttatatgtatatatgtatatatattaatatagggttatatatatagttaatgatttttagtaaaggtgttaggtaatttaatagagtaaggtatgtttttttaataaatggtgttagaattggatatgagtatagaaaaataagaattaattttgattttaaattaaatataaaaattgatttaaaatggattatataatattttgatggttataataggttaaaaaatgtaaaaatttaaaaaattaaaaaataaaaggaattatagaatatataattataaaatttttagaaaataagagaattttttttgattttagtgtaggtaaagattttttttataggttataaaaattataaattgaaattggaaaaagttgataaattggattttatgaaaataaaatatttttgtttattaaataatattattaagaaaattaaaaggaaaggagtaatgtggaaaaaaaaatttatgatatatatatttgataaaggatttatatttagaatatataaaaaatatatgaaataatatttttttttttttttttttttgagatagagttttgttttgttatttaggttggagtgtagtggtgtaattttggtttattgtaagttttgttttttaggtttatattatttttttgttttggttttttgattatttgggattataggtgtttgttattatgtttggttaattttttgtatttttagtagagatggggttttattgtgttagttaggatggttttgattttttgattttgtgatttgtttgttttggttttttaaagtgttgggattataggtgtgagttattgtgtttggttaattttttttttaaatgagatttatggggaaatagttaaatgaagaaataataaagtagtaataaaataaaatttaagttttattttattgtgtagttgtaggataaagagtagaagtttgtagttggggaataaggtgtttatttttttaagtattataaaatgaaggttttagaaattatttgattttgaaataatataattttaaaaagaagtaagatgtggatagataattttataaaggaaaatatgtaaatgattaataaggattttggaaaattgtgtgattttataagttattaagaaaatataaaataaaagttttaaaaaaaaatgaagtttggaataattgaataaatatataaaatgataataaaatgaattttgattttttattttatattatatgtaaaagttaatttataaaagttatataattttaagttttttaaaggaaaatataaatatttttgtaatttggtagggtaggtaaaggttttttataaagaatatagagagagaattataaagaaaggagtttgttaaattagattttataaaaattaaagtgatatatttttgtttattggaaaatattattaagaaaatgaataggttgggtatggtggtttatgtttgtaaaattggtttttggggaggtagaggtaggaggatagtttgagtttaggagttttagatttgtttgggtaatatagtgagattttgtttttgaaaaaggaaagaaaatgaataggtaagttatagattggaataaaatatttgtaaaatatgtatttgataaaagattagtatttagaagaaaaagttaagtaatttaattttaaaatgagtaatagatttgaaaagatattttataaaggaaaaatatatgaagagttaattatgaaaatgtgtttaattgtattagttattaggttaaagtaaattaaagttataatgagatgatattattatatgtttattagaatgattaagattttatagagtgatagtattaaatgttggttaggatgtggagtaattagaatttgtatttattgttggtgggagtgtgaaatggaagggttattttgggaaaagatttggtagttttttataaaattaaatgtatatttattttatatttattttaggtgtttttatagaataaatgaatgtttatatgtatagaaaaatttgtataagaagaattagtgtaataggtttatttataagagtttttagatggaaatagttaggggttttttaataagagaatgattaaaaatttatagaatgtttatatagtggatgttatttagtaataaaatagaataaattgttggtatttgtagtaatatgggtagttttaagaaatatttaaattggtaaaattattttgtggtggaaaaaaagtataattgtggttgttttggggaaggtggggattgtgatgtatttggaggggtatgaggaatttattggggtgatagtgatgttttatgttttggttaggttgggatatatgtggatatttttgttaaaatttaaagaatggaatgttttatatttgtgtattttagggtatatatattttattttaaagaaaaataaaaataattatagataaatgttggattttagttaatgaaatgtaaattgaggtgttgataggatgttgtgtgttgatttttgtagtttattttaagtgtattaaaattagtgtggatgttggtggttagagggatttgtggtgaagtaaatagtaaaatggttgttgtggaatttaggtggtaggtgtatgggtgtttattttagaattttttatggttttttttttgtggttttgttttgttttgtttttgagatagggttttgttttgttgtttaggttggagtgtattggtataattttagtttattgtagttttaattttttaggtttaagtaatttttttattttaattttttgagtagttgggattttaagtttgtattattatgtttgattaattttttgtattttttatagagatgggattttattatattgtttgggttggttttgaatttttgggtttaagtgatttttttattttaattttttaaagtgttgggattatagttatgagttattatatttagtttttttttattttttttatgtttgaaaagttttatggtaaaaagttggaaaaatgtaaaaaagattgaaatttattaattaaaaataggaaaaataaaataaaagagatggtaggagattattttttttttttttaatttagtttttaattttttttttttttgtttagttaggataggaattttaagggtttgggttttttgtgtttgtgtggggaaggaggtatttttgtgtttgtgtgggggttggttatttgttttttggtgtattttttgtattttatttttttttgtttgtagtgagtagttatagttggtggaaattatatttaggtagtttttgtttataaatttagtgaaaatgtaaattttgtaggagttggatttttgagagtttgtggtgttatttgttggaggaaaggttttttgtatttgagtttttttttttttttttgttgttatttgtttttttgtttaggttgggtgggttttttttttgtaattttggggtattggtgtatgggaaatgtttagtgttttataatttttttttatttatattttaatatttagtttttagtggatattgtttttgtttgataaatatattatataggtatagtttaagattatttattttaggaggagtataagttttagtgtttattattttagtttttttttttttttttttgatgtagtgatataggtttaggatattgaagatttttgattttataaatatgttgaagttaattattttgaagttgtagtttttattattattattattttttattttttgtaaagataaagttttgttatgttgtttagtttggtttggaatttttggatttaattgatttttttgttttggttttttaaagttttgggattgtaggtgtgagttattgtatttagtttgaagttgtagttttttaattattgttaatagtaatatttatttttttgtgagtagtagggtttgttggtatggttgatagttttgtattattgtattgaatttgttgtttgggattttaggtgagttttgatttttagttggagggataagttgtgtggggttgggtagggtgaattgtgggagattaagtttagattgagggttataagttatatgagtattggggttaggtagggatagtgaaggagatagtgtaattttgaggaaagataatgttatagaatggagaggtttaggtttggggtttttttttgttgttggataggtatgtttgtgttttttttttagtttttgtgatggttaagttatgtgttttttgagaggtaagtgaggtttttgatagtaggttttaggttttaattaaattgtttgttttgtagggtgagttgtataggtgtttttatttttgatttttttgaatttttgttgtttttaagttttatttattttttttaggtgaatagaaatattgtttaggggagaatggaggaagaatttaggaaaggttgtttgagagtttggttgagtttatgttattgttaagagtagtgttaaaatttaggagttggtgagattatggtttagggtttatattaatatgagggggtgttagttttatgattaatgagtttttgttttattattttttgttatttatattttgagggttatagttagtatgtgaattggagttggtttttggtatttttttttttatattagttttataatgtgaggtgggggtttgtttttagaggtatttggagtagtaggtgttttaagagggggaagtttttttgaagtttttttttatttatggtataggatgtagaggggatagagtattaggaatatttagtgattataggggtttgttttgaaggagaggaggtaggaggtagggagagtggttgggaggttagttttggagtgtttattttttattttgagggagaggaaggaagtagaaggtgagtatagggagttttagttggggatggagtgggggttgtagtttgattgtgttgtttggagtgggggtatggattgtagtttttatttatttgtttggttagtttgaagttattttaagtttggagattttatttgttttgtttattttttttagggatggtgtttaaattttgaagttttggttggtgttgtaaatatgggagggaggttttgttttattttagttttaagagttagttaagaatgttttggatatttgaattttgttttgagttagaggttgggaagaaatttgaaggatggtgggatggtggatagtagtttttaggtattaggtattagggtttttgtttggggatgggggtattagtaggtgttaagtgtattatattagggtttattatgtttttgtttagagatttagtattttatgaaataggaaggaatgagggatgagtgtgtttttttttttaatattttagtttttgttttgaggttgttaggtatttaatttttttaggatttaaattattttggttttatttatggttaagtgtattaaattatagttaggattattgggtttagatattaaaagtgttttttttaaagttggtagttattagggtagtatagggtagtgtaaggttgggtagggttggttatttgttagtatttagtggtttttgttggatgttgatgggggtagttaggtaggtgggtttatttagtaattaaagagattttttttttttaattttttttttaaagagattttgattttttttttttagttgtagggtttgtagtagttttttttttagtaggtttttttgtttgtttttggttatttttagtagttatagggtattgaggttttattatagtgagaataaaattaagtttttattagggtttttaaggtttggtatgatttggttttgtttgttgtattggtgttattatggtttgtttttgaaaatatattttagttatttttattttttttaggttttagttttgggtttttatatttgttgttttttttgttaggttgttttttttttggattttggtttggttgggtttttttggttattatagttttagtttagtgttattatttagaaagggtttttattaatttttttgttatatatatagatatgtatttttagtaatttgtttttagtttttttatagtttttatttaaaattatttatggatttgtttatttgtggattgttttttagttttaattgttaagtaataagtgattagtgattgtgtttttgttgttttttattataggttaagtatttaagagaggggttgtatatagtaggttttaataaatatttattagatgggttaggtatggtggtttatgtttgtaattttagtattttgggaggttaagttgggtggattatttgaggttaggagattgggattagtttgattaatatggtgaaattttatttttattaaaaatataaaaattaattaggtatggtggtggatgtttgttattttagttatttgggaggttgaggtaggagaattgtttgaatttgggaggtggaggttgtagtgaggtgagatggtgttattgtattttagtttgggtgatggagtgagattttgtattaaataataataataaaatatttgttagaagaattaaagtagtttgtttgtgtttaataggaatttaagagtataagatgaatttaattaaaggatatatatagtaggtattttatagttgatatttgttggtggagggagattaggaaagtggggagaggtagtgtttgggtatggggatattttgggtatggggatgttttggatatagggatatattgggtatggggatattttgggtataggatgttttgggaatggggatattttgggtatggggatattttgggtatggggatgttttggatatagggatattttgggtatggggaaattttgggtatggggatgttttggatatagggatatattaggtatggggatattttgggtatggggatgttttggatatagggatatattgggtatggggaaattttgagtattgggatgttttaggtatggggatgttttttgttatttgaaattttgtagttttattatatttgtttgttttagtaaattggtttaaagagtatttttaagtttttatggtaaagttttagagttagtgtttttttgttgattttgagggtgtgttgtttatttagtgtttaagttagagtttttttatttagaaaaaaaaagaggagggtggttttatggatggaggtatgagggtgtttataggtagagggagtttttgggttgagatttgtgttattttttgttttaattttaaggtgtagtttggagtttaaattagtttttaaatgtgggttgttggttaagaggaatttttttatttatgatttttttttatatttagtttttattgtttagagtatgttagttttgtttgttttggtttttaggatttttttagggatttttaggttttaagttagggtgggtttgaattaaggtagttttagaatttatgttaatgtttttgttagtgggagattttggggagtattgtgtgggatgtatggggttaggtgggggtatatagtgagtggttttagaagttttggttgtttggagtgggggggtgtttagagtaagagatgggttaggaagttggagtgagtaaggaggttttagtttttggtgggagtaggttgggtaaaaataaattaatttgagggtagtagttagtgagattattataggaggggtggtggggttggaggggttttaggagtttaggagagggaggtattgttagaggtaaggttggtagatgagagttagtgttggtaggattaatttgttatagtagttatggtttattttttttttttttttttatatatgtttttggggtttatggaatttattagtttattataaaggatattataaaggatataggggaagagatgtgtagggtaaggtatgggggagggatgtagagtttttatgtgttttttaggtgttttattttttaggagtttttatatgtttatttatttagaagtttttggaattttatttttttgagtgtttatggaggttttattatgaaggtatgattgatttaattattggttgttgatgatttgtttaatttttagttttttttttttatttggaggttgtggggtggtgttgaattttgtgattttatttggttttttttgggaattattttgaagttgttagttggtttgttaattatgagtatttaaaaagatattattttggagattttaaggattttaggagttgtgtgttaggaaatggagatgaaaattaagtgtatattttataatatgatagttagttttttttaattttagttttattttttgttgtgttgttggttttagttttttgtgttttagggtttttgaatatattgttggttgtttgtagtgattgtttttgtttgttgggtttgagtttggtttattttttttatttttttgtgtttagtttgaaggtgtttttttgaggtagtttttttgatttggttttatgaattgtaggttttgttttgttattggttttttttgttatatttgttattttttgtgttttatgtttattgatgtggttttgtatttgtgtagttttatgagggtaaggattgtgtttggttttgttttttatgggattttagtgttaagtttatagggagtatttaatgttgaatgaatgaatgagtgattggtaagggaggtttattttgttatgttgggggttaaaggttgttgggtggattatatgggtgaggttgggtggggagggaagtagagatgattttttggaagaaggggtaggaggtggggaggtgggtgtggggtgttgtataaggatggtaagtgtttttaggggtgataagttaatttagagtattaggtagtagaaaaaggttgatatttttatgttttatttttatttagggagaggttaggtttttgggaaagttagttttttgttgttaggagagttttaagggaagttttattagttgttgagttggttatagtggaaatttatgtggtgggtgggaggggtttgaggtataggggtttgggtggtggttttaggatggagatttgtgtttagattatgaggggtggttttagggatgattatttttaaataggaagtagataaaggtatagatggtagaagtggaggtagagaatgggttgtaggggtttttttagagggagagttgagtaaggggataggttggaaatatttagtttttatggtttgaagtatagatagttggttttatatgtaggttgggtagttatattatttagaataaggggtatgtttgtagggtaggttttaggatgttttgggttggttttgttattagtttagaaagatggtttaggtttttttggtagggagtatgtttagttaggttttgggtaggagttgagattttttggttggtttgagaggggatgattgagtgtaggtttagtttgggatttttttatttttttttgttatttagtggaattagttgggtgtgagaaaagaagagaagtgaattaagagtttagagtatgaggttggattagtttttatattatatgtaaaaattaatttaatttgtattaaagatttaaatttaagagttaaaattataaaatttttagaagaaaatataggggaaaagttttttgatgttgtatttggtaatgattttttggatatggtgttaaaagtataggtaatagaagaataaatagataaagtggaatgttatagaagtttaaaatatttgtatattagtttgggtgtggtgatttatgtttgtaattttggtattttgggaggttgagatgggtggattatttgaggttaggagtttgagattaatttagttaatatagtgaaattttgtttttattaaaaatataaaaattagttgggtgtggtggtgggtgtttgtaattttaattatttaggaggttgaggtaggaaaattgttggaattagggaggtggaggttgtagtgagttaagattatgttattgtattttagtttgggtaatagagttagattttattttaaaaaaaaaaaaaaaaattgtatattaaagggtattaataatgtggggagaaggtaatttatggaatggtagtaaattataggttagatatgggattagtatttggatattaatttatagattttttaatatttagtaataataattatttaaattaaatataggtaaaggatttggatagatatttttgtaagaatatgtgtaaatgagtaataaatatgaaaagatgtttaatattattaattattggggaattgtaaattaaaattataaggagagattttttataattatgagttttgggtaggtaggaagatgtttggtggggagttgttggttttatgttgtttttagaatttttgtaggggttaagtttgattttgatattttattaggagtatagaaatgagtggaaaaggttaaaggttattttaaagggttagaggggtttagtaaggagtttgggatatggaattatgttgtgtatttagatatatggggataatagggggatgaaaggtggtttttaaaatttatatttattttagagtttatgaatatggtttatttggaaaaagggtttttgtagatgttatgaagttaaggattttgagatgggattattttgggttatttagtgggttttaaatttgagaaagattgtttgtatgagagatagatagggggagatttagggtatagaaggaggttttgtgataatggaggtagaggttgagtggtgtggttatgagttaaggaatgttaagggttttgggagttgttagaagttgttagaggtgagaagtaggtttttttttggagtttttggaaagaattaggtttgttgatgttgtgattttggatttttggtttttagaatggtgagagaagaaatgtttggtgttttgagttatttagtttgtggtatttggtgatggtagttttaggaaattattatagggattagagtttttatggggttgggtaggaagtgggtgtagagtgtgttaggttaggttttttattttggagatggaaaagtagagttggagaggttgagattggataggtattgagtgtttaggggtaagaatttttaggggatggtagaggttattggggatagtatagtgagggataggagggaggggtgagggttgaggtattgttttttaggaggttttggttttttgtttattgatgatttaggaattttgtaagaggagttgggttttattttgtgttgtattgtattagatggattttggtggggatagatgtttagtgatagtgtggttaagttttttttaggattttgggtttgtatttatgattatgtatagatggttattttttttgtttgtagtttttttttgtggtttgtttttagttttttagtttaatagagttttttagtggaaagttttttttttggagattttttttttgttgaaatataagtttttggaataagataaaattgtttaatttgtaaaagttataaagttgttttagaataaaaaaaaagttttgatttttggttggaaggagtggttttttatgttttagtggttagttattattttatgatttatgttggttttgttgataaattttttagtatttttttaggggaaggttatagtttttagggagggtgggagagtatttaggtttttgtttataaattagattggagttagatattgttgagggagggataagagggtaggttttggggtttttaagttttttttggggttggtagattattgtggatttattagggtaggattatttttttttataaattttttttgggtagttgtagggtagtttgagttggatatgttttatatgttagtttagtggggtatgaggtatttatagttatgtttggaagttagtgggttggtatttgttgggtaggtttttgttatataggtatagtgttttttttatggtttttttttaggttagagtatgtttggggattagagtagtttttgtagtggtttgtagtttgataatgtggtgtgagttatgttttgtagagaagaagagttttttagtgagggaagaggtgtttataaaatttaggatatgtgtagaaatttgtaggaggtgggggtgttgtttaggggttgtgttgtttttattttttattttgtagatgatggaattgtggtttagagttgttaagtggtttgtttaaggttatttagtagggataggaaggaagttatttttttagggattgtgtgggagtttagtgataattaaagattagtgttaaagtttgtttaggatgagaattttattaagggaaatagttttgggattgttgtgtttatttggaaggtagttagtttataattgagtttttaaaaatgtatgtttttttatatgaaaatatatttgaatgggattttgtagaaagtattttttattaaggtatagtttgaggggaggtttttgttttatttttggttgtgttgtttttagttaagggtagtagggattagagtggtttttggggtatagtattggttgtttttaaagagtgttttgtttagtttatgaaaagtttgtgttttgtgagtttgggagggtgttattatttttagttttttagggagtattatttttaaatttatgtttttttgtttagtttttagattttttgttggttatttatttgggttttggttagattatttataaagtgaaggttgaatttgaggttttttgaggtttttgttagttaggtgggtggagtgatgtttttttggggttggtggtttaggaggtaggggatttattgtggtttgtttaggttgtttggtggggtggttattttgaggatggttttattgtgtaagtttgatgaaggttttttttagtgttttttgttttgtggtttttgttgggtggagagtaggatgttgggttttatatttatttgttttagtgggtttgagtttttgagtttaaatagataagatgtagttttattgttatttaagttttttgttgttttttttggtttttttttgaggtttgtttgttgtgtttgattgggtgtgtttagtggtataatatatatttgttttattagttttaatgtgataattaagatgtggttttgaggttgggtgttgtggtttatgtttgtaattttagtattttgggaggttgaggtgggtggattatgagattaggagattgagattattttggttgatatggtgaaattttatttttattaaaaatataaaaaaatatggtgggtgtttatagttttagttgtttgggaggttgaggtaggagaatggtatgaattagggaggtggagtttgtagtgagttgagattgtgttattgtattttagtttgggtaatagagttagattttgttttaaagaaaaaaaaaaaaaaagatgtggttttgggagtagtggtggaggggattatatgttttagagaggagttattgagatgggttttttttttttaggttttttagggattttttaatatatatatagtggtaattaatagattagggtttaaggtatgtaggggttgatatttttagtgattttttgttttatggtttgtaggttattttagaatatttaaagtttggagtttggtttagttattttatgttttttagtgttgggtttagagggtggtatgagtggtagaaattgttattattgttaattattgatgatggtgttggttatgtgagatggtagttatggtattgtatgtgagtgaagggattaaggaggttgggtttgggagggagggtttggaaagttggggtgaattaaaggtaggggagttttttttttttttatttgtttgtttatgttttgatgggtttgtgtttgtggtaagggggttgttagtgtgaatggatatatgtatatatatgtatatatatgtgtatatatatgttaggtttttttgagtgttgggagtttttttttttataattaattgttaggaaggtatagaaatgttattttaggtaggagattgaggtagttttgaagatagattttggttggaagtaaaaaataaattatatagtggataaattaattattagttaggtttaagtgttgttgttttagatttgagttaggggggtaggttttttatatttttttaaggttttggtgttaatagttttagtattgatagtggttatgatatgtaagaatggtatattggaaaatgaaagggaagtagttaggagagaggagagttgagtttaaataaaagttagatttaggagagtttagtttttgagatggagtttattttatgagtttggaattgttaaaaagaaaagaaatatttttgtgaaaaatgagtaaaagtgttttttgtatgtttatttttttaggtataaataaagttttgagtttagggtagtggggggtggttgatggggagggggttgtttgtgtatttgagatttggtttttttttatttttatggatatatttagtagtggtgggagttttggtgttttgtttagaggtggtttttttttttttatttttgttgtttttttttttttagttttttttttttttttttttttttttaaaaatattttttgtttggtttaatttttttaatttgttgtaattatgaatgtatttgaattattatatttttatgtgttgattatatgtttgtgttttaaattgaagtagtattgtttttttaaaatgggaggaaaaagggagtaaaggagagaaatttaaaaataggaggtaggagagagggtttgaagtgggttttgaggagtttggtagattattgggtttgtttgtgagagttttagagttttggttgtttggtttggttggtggttgtagaggttttgagtgtggtttttggtagttttttttttttattttttttagtttttgttgttttgaggtttgttgtttttttttaatatttatttggagatgtttaatttagatttttggaaattaatttatagagttaaatttttgatgatttttaaagttttttattttttttgttttgtgatgttatgatttttttgggtttaagggtttaaaaagtttagtttttgtgtgtttgttttgtttttttttgttttgggttggttttagtttttttttattttgtattttaatgtggttgggtaggaggaatggttgtgttttaggttagtgtgttgagaaaaggttttggagtatttgtttaggaggaattttgagaagttatttttttttgttttattagtttgtagtgatagaggtagttgttgtttttgtttaggtagagagggtgaatgggatggggattttttggaagatttttattatatatgtatgagttagtgagtttttagttgttttttgggagggagtgagtttttttttttgggaatttggggttttattgggggattagtgttgttttttattgtttatttggggtttttagaggttgtttatttatttggggggtttttattagtatatggttagggtttatgttgaggttaagggtttagtagagtaggtgggggtttataatgtgggtttttggggtgggaattaggggtattttttttgtttttaagttttattttaagggtttatttaaatttgagatatggaggttggttttgttggtttaagtttgtttaaagagaatgtgtgtttgtgttaaggttgagaatttaggtaatttttttgaaaattttagattgttagtttttgttgagaaagggaggatgtgtggttgtattatggaagtttttttgtttggttgtatagggttggtataagatagttttgttttttagataaaatattttttagtttgtgttgttttttaaggtttttaataaatttataatatttgtatttttttattttgatatattttgtaggtttttgagtttataatttttgttttatagagttaggtgagttatttgtgattaggtgaggtttatgtatagtttttggttagatgatagagttaaaggttttgaagtgttattttaggttatagttttgtttgttttttgtttgggataggattttaaatgtaatttttttggtagaaaggatatttttttggggggtggggaggattatttttagttttttgggagatattaagtaattatttttttttaaagagtttggaggatagttttataggtagttagatagtgagggaggtggggatagtattttagttgaggtgggaggttggggaggaagggagggattatagttatgagagaaggttgaataatggttttagggatagtatgttttaatttttagatttgtaaatgggattttgtttggaataagagtttttgtatttgtgatttagttgtagattttgttgtggtgagagtattttggatggtttaggtggtttttaaaggtagttttggtgtttatataagatgggggtagagggagatttgatatagatagggatggttaagtggagatggggtttggagagatttgtagatgttggtgttgaaggtaagggttatgtagttataagttaagggatatttatagttattagaggtttaaaggggtaggtgatgaaggtagtggtttttaatttttttggtatttgggattggttttagggaagataatttttttatagattagggagtggggagatggttttgagatgatttaagtgtattatatttattattttattttattttattttattgagatagagttttgttttgttatttaggttggagtatagtggtattattttagtttattgtaatttttgttatttgggtttaagtaatttttttgttttagttttttaagaagttgggattatagatgtttgttattgtgtttggttaatttttgtatttttagtagaaatggggttttattatattggttaggttgattttgaatttttgattttgtgatttgttagttttggttttttaaagtgttgggattataggtataagttattgtgtttggtttttattttttattttttgagatagagttttattttgggattataggtgtgagttattgtatttggttataagtatgttgtattgattgtgtattttatttttattattattataatatataatgagataattatataatttattataatgtagaattagttggagttttgagtttatttttttgtaattagatggttttatttggtggtgatgggagatggtgatagattattaggtattagatttttataagaagtatgtaatttagattttttatatgtgttgtttataatatggtttatttttttataagaatttaatgttatggttgattagataggaggtagagtttgggtagtaatgtgagtaatggggagtgattgtaaatatagatgaagttttgtttgtttgttagttatttattttttgttgtgtaggttagtttttaataggatatatggggttgggaatttttgttttagagtttttagagggttatgtttagtggatattttgattttagtttggtgattttgattttggatgtgtggtttgtagagttgtgagaggatggttgggtgttgttgtgatttagttagtttgtggttatttgttatagtagttgtaggaaattgatgtagtgttatagatggagttagggtttagtttattggagttgttttttgttattttatttttttttaaaatattgtgttaagttaattattaataattattgattttgatgggtaggaattgtagaggttttttggtttgtttttttaattttttttttaattttgaaataatattttttgttggtttttttgattataaatgtaatatttttttttgtattgagtttagaaataagagaaaaagtaaaaagtagaaattttagttgggtaaggtggtatgtgtttgtaattttagtattttgggaggttgtggtggaaggattgtttgaagttaggagtttgaggttgttgtgagttataattgtattattgtattttggttgggtaaaaagagtgagattttgttttaaattaaaaaaaaaaaaaaagaagaggaagaaaatttattaattttatttgagattttttatatgaatttttgttgtggggtagggaagtttaggaaggttttatgaggttttgatttagtttggttggtggtgggaatttgggaatagttttgagtgaggggttgggttatgattgagtttatttatttagttattttttgtatgttgtgtatattatgggtttgatggttagggttggagtatttgttgagtatagttttgatttttagttttatttagtatggtttggtttgaggtttattttttttttgtgtttgaaaatttaaatattttggtttaggtgggggattatttgaaatggaaaatttggtagtattgattggttttgaagaggtaggagttagttatgagttggttgggaggtgagtgtagaggtggtgaggtaaggttagtagagggtgggggaggtgagggttaattttttattgtgtatggtgtaagtattaagggggtattttattaggttagtgtagatttaggtttttgtggtggattttttgtggtttttttttttagaggaatattgaagaggtttttgtggttttgttttagatttagaggtatatttgtatattaaatgtattgagtaattttatagtgagggagttgggtttggtttaatttatttttttttaaattggattaaaggttgttgttttaggaaggtagggtttttaggtttatggttttgggaaattttggttgtgttagtttatgagtttagtttttagttattttagtttgtttatattttggagtgggtattgttatttaaaagttttttttagatagtttttagggtggtatttttgttttttattttttatagatttttggttatttttttgtgatattagtattattggtttatagttttttttaattgtaaagtggggtttagtggtataggttgggtttggtagggtgggaaggaagagtgaaggttattttgtttttaatagtattggttgggttttggaaaggttggaatttatagataggaaggaagtgttatatttatttaatttgttttgtgttagttagggggtattttgtagaaagaagttaggtggttgtggttgggtgtagtggtttatgtttgtaattttagtattttgggaggttgaggtaggtggattataaggttaggggttttagattagtttgattaatatggtgaaattttgtttttattaaaaatataaaaattagttgggtatggtggtgtatgtttgtaattttagttatttagaaggttgaggtaggagaattgtttgaatttgggaggtggaggttgtagtgagtttagattatgttattgtattttagtttgggtgatagtgtgagattttattttaaaaaaaaaaaaaagaagttaggtggttattttttagtttttggtttggtttaggaattgttttttttttaagatgttattaaatgttttttttattaggaagttttttttggttgttttttttatttttgtttttgttttagaatatggtttggtttttatggataattttgatattagagtttaatagagatttttttttttatggaaatttatattttaaattgaatatgtgtgtaggataagtttttgtttttatgtgaaataaaagtgaaaggtgtggattatttgtttttttttatttttttttataataatttgggttttataggggtttagtaggagttaggtttagtttagttgttttaggtgtattattttgggtattagtgtttttgtttttttttatgaagtatagttttattttttggtatttagtggggaggggatatatattaggtattttttagggtggattgtgttttttatattaggttaggaggttttggggttggtttagttatttagaaaagggagtaggtggtttaggtgatattgatgtgggtagtaggggtttttgggaaagggtttttgtaggattggttttattttgttttaggagtatatattggggaagggtgttgtgtggaggtggagagaatgtatttttggttgaaagtatgttttttgatgttttgggtttggatttgttgttattttttatgtttttttatttaatatatgttttagtaaattttttatgttgatgagtgttaagttatagaggatgtataattttttgttttaaaaagtgattttttttgttgggtgtggtggtttatatttgtaattttaatattttgggaggttaaagtgggaggattatttgaggttaagagtttaagattagtttgggtaatatagagaaattttatttttataaaaaaaaaaaaaaaaaaaaaaagtttaggtatagtggtttatgtttgtaattttagttatttgggaggttgaggtaggagaattatttgaatttgggaggtagagattgtagtgagttaagattatgttattgtattttagtttgggtaatagagtaagattttattttaaaaaaaaaaaaaatttttttttttgaaatagggttttattttttttgtttaggttggaggatagtgatgtgattataatttattgtagttttagttttttgggtagttggaattatagggttgtattattatgtttagttaattttttgtatttttagttaagatggggttttgttatgttgtttaggttggtttggagtatttgagtttaagtgatttttttattttggttttaaaagtattgggattataggtatgggttattatgtttagtttgaaaatattttttttaagaattagttagttatggtggtgtataattgtagttttagttatttaggaggttaaggtaggaggattttttgagtttggtaggttgaggttgtagtgagttataattgtgttattgtattttagtttgggggatagagaaagattttgtttagaaagaaaaaagaaaaaaaaaagatttttttatttattttttgtttatttttagatttaattattgaagtttgtttttttgaattaaaaatgaaggagttttgttttggatttttttttgttgattttgttattgtatttgttagtagagttagttaagattttttaggttggttttagtttggtttgtttatagttttttaagtaagatggatttttaggttgaggttagttgtatttttttttggaatttttttttattttttattgtgttttagattttggttgtttttaaataaatataatttagttatttttgtttttggggttgttgtagggtttattggtgtaaattgtttgggtaggtttgttgttttaggagtttttttaggttagtgtggaaggaaattaagataatggggagaagtagtttggttgggtttaattttatttttatatgtttgtgtttagttaattatttgggttgtagtttgataggagttggagttggtgttttatttttagagggggtttttgattgtttttgtagagtgagggaggtttgggggtgtagaggttaagggtttttgtagagtttgttttaggttttttgagtttaagtttttttgtagttaatggaagatttttttgagagtgggtgttttttattttgtttgtttagtaggtgtttagtaattgtttattggataaataatgaatttgtggatttaatgtgaagatgatttaaattagtgtttttttatagaattttttgtaatgatgttaatgttttgtatttgttgtagttaatatggtagttatatgtggtagtgaatgtttgtaatgtggaagggttattaaggtaaagagttttgtatttatgttataatttaaatttaaatagttataaatgtttagtgtgtgttttgttatatagattttttttgttattttttttttttttttagagatattgtatttgttattaattttttatttgggaggtaaatggagaaatgttattttttagttaatgtaaaagaaggttaatatttgtattttaagttagttttttgggtaatttttttaagtattttttattaaggttagtttagtaatattttttgattgtttgttatgtattaggaaagtattttgttgtggttttggtttgaggttatggaggatatagaaataattaaggttaagttgatagaaggggtgtgataagatggtttaaagttattgagttagttaggaggtttaggagtatggaagttttgttttttagaggataagtggtaatttatttagggggggtttgagtatttagagttaggagtgtagaagtagggggttttaggttggaaagtggtattagggttaggttgggtggtagtatgaatttatttttgaggttttgggggtggaaattaagggttttatgagtaagaagatttggtttaggtttaatggaaatgattgggtggagggattttattatttggtttttagtatatagggagggaagtggtaattgttttttaaatgttggttgtggaggggaaggagttatagtagggtaggggtggggaggatggtatttgttggtttaaggagggatgatggaggtttaattaagatatgattgtgattggggtagtttgtttaagggttagtatgtagagggtgagttgatgagattttggtagtttgttgagatttgggggtgttggggaggtagaggttaaggttaattttgagattttttgtttgtaaatttgggtgggtggtaaggttgatattagagaaatagaggaagagtgggtagttatgggtgagagaggaagtaatgaattaggggtgtttgtaagagtttaggggtaaggtttttgggtagttaagatgttggtggttttttttatgattagttttttttatgtggtatatttttgtttgtatggttgggtatggggtatttgtttgtttgatatattttgagtagttattttgtgtattgaggtaatgtggtatggtgttttggggaaatagtgaggaggtattgtataggttttatttttttggtattttttgttttttggggatggtggtagttaaataagtgatagttaattgttaggagagtttggttttgatttattaggtggagttaggtatttttgttggaagaggtatgggaattagtataggatgaagggaggtagtgagtattagtttaggttttgtttttatagggttttttttttatatttatttgtgtaggtgttttttgtgagggtagagatatttgtagtgtttgagggagattttttgtgggtggggttgtttatttatagtggttaggtgggaggtgtattagtgttttgtggttgttataatggattatagttgtggggtttgaaaaaatggaagtgggtttttttttatgttggaggttagaggtttaaaattaaggtgttagtaaggttatattttttagggaggttttggggtggggtggggggggggtttttttttgtttttttttagatgttttttggtttggggttgtgttattttattatttgtttttgtttttatgtggttttttttggtgtgtttgtggtttttttgttttttttaaggatattagttgttggatttagggtttattttaatttagaatgattttattttaagatttttaattatttatatttgtaaagattttatttttaatttttaggttatattttgaggtttttggtggatatgagtttgtgggggatatggtttaatttaggatagaagggatgatgggggtattggggaaaaggttatatattttagaggtattggaagatggaagagtaggatttagtgatatgggatgttaggtagaggagttggttttaaggattttagttggggtttgagggttagagggagggaagtttaggtattattgagatgaaatgttttgtgtattgtgggaaatagggtaaaagtttgttggatgtttagttagagaggtggttgtttgaggtatagaaaatgagtgaatatgggagagtttattagaaggttatttgggagggtgtggtggtaatatttagaagggttgagaagtgtatttttatagtttagttaaatttatttggggaaatatatgtttttggtagtattagtaatagagaagatttttggtgatgttattagtgggttatgggatgggtaaattttgtttttttatatagaggaatatttgttagttgttaaaataagtgaattaaggttttgtggatttatatggataagtttttatgttgttatgttgtgggtataggtagggtagttattgattttagtgaggtattaaggatgtgatgttgatgatggtatttaagaggagatagatttaggttgtttagttatatgatgttgatgattgtatgtaagaggagattaggttggatgtggtggtttatatttataattttagtattttgggaggttaaggtaggtggattatttgaggttaggggtatgagattagtttgattaatatggtgaaattttgtgtttattaaaaatataaaaaaaattagttagatatggtggtgggtgtttgtaattttggttattgaggaggttgaggtagaagaattgtttgaatttaggaggtagaggttgtagtgagttgagatggtgttattgtattttagtttgggtgatagagtgagattttattttaaaaaaaaaaaaaaggagatttaggttttttagatatattattgtttagtatagatgtgtttgtttggggttagattttaatttagaggggtgggtattgtagtaggagtggggttaggatggagaaggttatttagggttgtggttatatttgtaatgttttattttttaagtgggatggtgagtatataggtgttttattattttattttttatatttttgttttgtagttttaagaattttattttttttttaaaaggaaagaaagtgtgtgagttgattaaagtgttgattatggtgttatttaagtttttgttagaaatgttatttttggtttagttttaaatataattttgagaagagtttttgtttttttggggagggtaagagttttagatataggagattggttagatgtggatttatagagaagttgggttgggaggatgggatggtagatagttgtttggggagtgttaaatggggaggttggagatgttggggtgtttaggaatgaatttttgtttggattagggttttagtaaaagggaggtagggagaaagaaagaagttaagaagatgaggaaagggtgttttgggttagagtttatagaggtttatagagggaggattttgtgtgttagtaggtagttttatgtaaatttagattattagtttgtagttttgggatttagtaaattatgttttaggtttttaagttgagttgtgattgtggttgttaagtgttgatagtatagaattagttagtttgagtagagggaagtaattgttgggggaggttgtgtttatgtagtttagggtgttaggtttttaagatgtaatttttataagaattgggggattttttttatttattttattagaagttggttaatgagagggaaggagatggagaggtagattagatgtggagttggagaaaagttttttagaaatatagtagtggttgggttgtttagtggttagtgtttaatatgattgtgatgggtggagttttttttaattatagtgttgaattatgtagttgtttaggggtttttagttagagtattatttttttttttttatatatagttttattttgtattgtaaggggttttatatgtatttaatgtggatatggtattttttttatttttattttttgtaaaaagttattttttttattgtttaggtttggtggtgtatagtttatgggtattgtatttatttttggaaggtagatttaggaggtgtttgtgttgtttttatagaagtaagtttaggattagaagtaggttttgggtttagaattttgaggttttaggtgttagtgtggtttggaattgtttagttttatagttattagttatatgtagatataagtggaaatttatttaaaataaataaataattttatgtaagtaaatgagtgaataaagtaaatgtaaatatttatattttgagtgtgtaatagatttaggtggttaagtggttattatataggatggtggagtgtagatgtatagaatagatttattattatagaaggttttattagatggagttggtttagagtatggaggtggtggttttagatgggtatatgtttttgtttttgtaggtgttttgttttggtaggatggttgttttattttgttttgaaggtagttttggtttataggtgttttatttgtgtggatttgattttgggtttgtgttttttggtaattttgttttttttagaatggttaatttatgaaggtatagtttttgtttgtttgttattatgatggtagttaggggtttggtatttagttggtttttagtatatatgtataggtgattatgttatttttgttttttttagagttttttgttttttaggggaggtaagtttatttattgttgtgatttattattttttttaaatagaaaagttattagatgggtatttgttttagtttggttgttggaagtgatagttaagaataatgtaggtttttagaaatagaggtattagtatggttatattggggttaggtaggggagattagggatatttagtggggagaagatgatgtgtagatttagttttggggggtaagggttggaggtagagttttgatttttttgttttatttttttgtttaggttgtatttagtgttggtagagtttttttaagtttataagttgtaatttgtgttttggatggttagttttagagttttgatgggtgtatttgttttttttttttattggttagtgtggaaaatttttaaatatatggaaaaagtataaggagtagtatagtgattattgttagaggtttatttatttttttttagataatattggatgtatttgttttattttggagtattttttattttgtaaggttgtagggagtttatagatattgaattaatattgagaggtttatggttaaagttatttgtttatggtatatttgtttttttagtattttaaattaaattatttagttttatttattttttgtttttttttttgttttgtatatatgggtttgttttttgagtttgggggtggttgtttttgtttttataaggattatttttagtagggtagtgttgataggtttggaagttatttgagtttaaagttgttaaagattgtgtttttttgggaaatgggtaagtggttttatttatttagggaagttaggtggggaggtaggttttagattagaatgaagggattttagtataaatatatttatgagttgggtggggttagagtggagtgagttatttatttgggttattggagttattaagtttttggagttggttattggaggtttgtgtgttttttaaagatagagataaagggtaaaggttatataaggttattggtgttttttttttgggtggatgattaatattaggaatgtttttgtttttgtttttgttgtgagttttagagttagaaatggggtttatttggggatagaggttttatttttttaggtaattttggatgttggagggatgatagttattgttgtttggttgttggaggggttttgggttaaatttttatatatatttttttttaagttttattatttttgttttgtagataaggaatttgagtttttatagagtgttatttttttgtggttatatagtgaatgagagttgtatataggtgagtttatgtttattagattttaagttgggttgtatttaagtgtgtttttgttggatggagtttttttttttttttatgtttatttgttttatgaattagggtttttttatattagggtttataatttatgggtagttttgatttagttttttttatttttagggttgggtgtagttgggttggatttggggatggagtgggataggttatttttattttttgttttaggagggaataaaaatagaattttagattaatgtagttttttgtggtatgtgttttttttgtttatatataggttttggtttggggttgtttgttggagaggtttatggtaggtaagttttaatttgaggagatttgttgaggtgttaagttaagtaaatttgaaaggttgttaggaggagtggttttgggagtataggtggttattttattgttgtagagtatggtattttggggatgttttttgggtaatgttatatagttattttttagagagttttagggatatataattagtttagttttattaatagtgagataagggattaggtagatttagatatttttttgtatttgattattatgttggttgttggttaaagatgttagtttttttttggaattttttagaaaggtttttgtagtatttatttatttatttatttatttatttattttatttatttatttatttatttatttatttatggattttatttattttattatttttttatatatttatttatttatttatttaatttatttatttagttttttatttatttatttatttattaatttatttatttgtttatttaatttatttatttattaatttatttatttattatttatttatttatttatttatttatttatttttttatttatttatttatttttttttttatttattttataattttatttttaaattgtgattagatggaaatgggtgtagttagtttgtttttaaaggtttagagtggaggtagagtgaattgtttatttggtttttgtgtttagtagtttaggtttgtatatatgttttataattataggatattagatttagtaattggtagtagaatgagtatagtgtattttttgtggaattagtattgatagggtatttatttttattaagtttgagtttttttggtgttggagggaatttttagatgggttttaattttagttgaatttattttttagggaaagtaatattgtgagaaatgtgtgtgatataaggttttaaagagggtgtgggttgtgatttttggagtaattagggaggttttatggaggagatgaggataaagttgagttttgaaggagggattggaggatgttgagtagggatatttatttttgtttgtgagggtttgatggtaggttgtgagttgtattttagttttgatttatttaatttataattttagtaggtaggtgtttttgttttattttatagaggaggaagtgaggtttagggttgggtaaattgtttaaggttgtatagttgtggaatttatttttagtatttttagtttgttttagttatgtttgtgattttatttagtattttttttttggtgtttatttattttgtttattgttaagtaataaaaattttattaggaaaatttaggggtttttggttagtttttttagatagaaaggtagattttggtgtagatttttaggaagtaaggatggaagggttagtatttgttttttagaaatgatagtttttttaagattaggagagatggtttagagtgtagttttggtgggttgtttaggattaggaggggagaggagtggggaggaggatgaattttatttttaaggttgttgagtggtatatagtgagtttggattttttagttttagttgagtttatttttatgatggttatgagtattttttttatatatttgattggaagttgtattgtatataatgtatatggggttattattttttgttttatatatttttatgtatatattattagtgtattattgggatattttgttgtttggggttgagagtgaattagaattttgtttataaatttagtatattttattgtggaaataatggggggtaaggaggggttgtttagtaaagaataggatatatgtttttgaggatggagttatttttggttgagatatttttgtaggggatgttggtgataaaggttgttttatttttttttttgggttagatggatattatttttgttttttgttttttagtattaggtaaaaggaaaatagaagaggttttatttaggttaaatattttagggttttttatttgtaggaaatatgttggtttattttttttaaatttagtatgggggtggagaaatggtggggaaaatagtatttgttttagattttttgggtggagtttttgttttatttatattgtttatttttttgattttttaaaatgggtatttggtgtttggtagtttttggtatagagaagatgtaaagtaaattgtttataagaagggggtgagtgtagtttgagtattttttgtttttgaataaattgttaggtttagtgtagttgttgttgttattgttgtttttaggaagggatttttggttatgagtggttttagtttagttttttggatttaattatttaggtttgtgtttgagtttagtaaagaggtagttagaaaagtttttaagatatttaatgattttgtggttttagttgagaagtgagttatttttatgtgattttaaaataaaatatatttagaaggagagaagataattgaaatttagttgtttggagttattttagatgaaagtatttgagtttttgggaggtaaaggaggtaggaaagtttggagttagatgattagaatttgaatgtagattttgttaggtttttgttgtgggttttgggagatgatttttattttttgagttttagtttttttggggatagagatggtgtttatttataggttgttttgagttaatgaggttatatggtgtaagtattagtatagtgtttggtataaaattaaaatttaataagtgatattattattattattattattattattatttttgagatggagttttgttttgttatttaggttggattgtagtggtatgattttagtttattgtaatttttgttttttaagtagttgagattataggtatttgttattatgttttggttaatttttgtatatttggtagagatagggttttattatgttggttaggttggttttgaattgattttaggtgatttgtttgttttagttttttaaagtgtttggattataggtgttagttattgttatttggttgtgatattattataatattaatattataatagttggttaggtatggtgatttatgtttgtaattttagtaatttgggaggttgatgtgggttagttatttgaggttagtttgagattagtttgattaatatagggaaattttatttttattaaaaatataaaaattagttgggtgtggtggtatttgtttgtaattttagttatttgggaggttaaggtaggagaattgtttgaatttaggagatggaggttgtagtgagttgagattatattattgtattttagtttgggtgatagagtaagattttgttttaaaaaataataataataaataaataaaatatattttgatgagatatggtaaaagatagtagaaggtaggagtttggggatttattatgggttggtgttttaagtagaaagaaatgtagtgtttataagttagagagtagatgttgaagataggagatgagtggggttttttggttttggagaggaaagggtgagtttaggtagaaagagtaaatttagggtgttttgtgtagtgttttttttgtggaattagtttagggtattagtagtatagtttttttttagtagtggagattaggttaattgtttagtgttttttttgtttttttgttttaattttattaagtatagtttttttttgggtatagtagttttgtaggggtggatattgatttatgtatttaggagtttagaggtttttttttttttatttatttatttagagatggagtttttttttgttgtttaggttggagtgtagtggtattaatttggtttattgtaatttttattttttaggtttaagtgatttttttgttttaattttttgtgtagttgggattataagtatgtattattatgtttggttaatttttgtatttttagtagagatggggttttattatgttggttaggttggttttgaatttttgattttgtgatttttttattttggttttttaaagtgttgggattatagatgtgagttattatgtttggttaggggttttttttaatggattttttttaatgtatataatttggggaatttagatataagaaagatatagagtatgaaggttttttattggtttgtttatttttagaggtggggttttaggtggtttaggttggttttaaatttttggttttaagtaatttttttgttttggttttatgttgggattataggtataagttattatgtttagttatttttttttttatttgggttgttatgttagaatttggtaagttataagatggaaatgtttaaataggtatttagaatttgagtagatattatttgatgtattattgttgttattttaatgattgaaatgtatttattatatttgtttttttaaaggttattttagatttttatagattttatttgtgatgtaagatagttattttaaatttttttgtgggtttgaatagattagatttttgaatttttgggtagagtagggatggggttgttttagaggagggtgatattgttatatttttgttttgtttttgtgttgataatgaatgaggtttggatagttttttttttattaaaagttatatttttttaaaaaggagttttttaggatgaggtgttatgataatttaattgtgtataaatatttatttttaataatgatagaagttatttatagaaaagaatttatttttggttgggtatggtggtttaggtttgtaattttagtattttgagaggttaaggtaggtaaattatttgaggtttggagtttgagattagtttgattaatatggtgaaattttgtttttaatgaaaatataaaattagtttgtatgtttgtaattttagttatttaggaagttgaggtagaagaagtatttgagtttgagaggtggaggttgtagtgagttgagattgtgttattgtattttagtttgggtgatagagtgaaatttttttttaaaatatatatatatatatatatatatatatatatatatatatatataaatttatttttatttttttttttgaaatttttgagagaggttaggtgtagtggtttatatttgtaattttagtagtttgggaggttgaggtgggaggatggtttgaggttaggagttggagattagtttgggtaatatagtaagattttatttttattaaaaaataataaaagtttaaaaagtttttgagatagtttttggggaaaggtgggttatggagatttttattttggttatttgtgttttttttgtttgtttttttgtggtttttttttattttgagtttggggtgggggtggtttgagtttaggatgggggtggtttgagtttggggtgggagtggtttgagtttgggatagggtggtttgagttggggtgggggtgttttaagtttgggttgtgggtattttgagtttggggtggggatgttttgagtttggggtgggggtgttttgagtttgggttgagggtggtttgagtttgtgttgggggtggtttgagttgggatgggggtggtttgagttgggatgggggtggtttgagtttggggtgggggtgttttgagtttgggatgggggtattttgagtttgggatgggggtgttttgagttgggatgggggtgttttgagtttgggatgggggtggtttgagttgggatgggggtggtttgagtttggggtgggggtggtttgagtttggggtgggggtgtttaggatgtataggttttattttttttttttgaggtttagtttgtttataggagttgtgaagggttggattaaagttaaaggtttaaattttagatttatttttagatttagtggataattaaaatatttaagtttatttttaaaggaagttgagataaggagataatggttattttttttttttttttttttttgtttttggtttttgttatttggagttgtgttttgaagaggtatattgggtattaggtttttttggttttgtttttattttttgtttagatatagaataatttttttttatttttaaggttgatatgtggggttgtggattaaagttaatttatttatttatgaggggagtaatttttttgttttaggaatttgtttttataggagaataaatattgtagaaggtattgtttttagtggtggtgtatgtttgtaattttagttatttaggaggttgaggtagaagaattgttagaatttaggaggtggaggttgtagtgagttaatattatgttattgtattttaatttgggtgaaaagattaagattttgttttaaaataaaaaaagaatagtattttgtgttaaggttaggggttttagttattttttttgtgaagtggaaggggtattattagtttttgtgagaaggaaatagtttatttaattataaaatgttaattaaaggaggtagtatattggttttggtgtggtgttgttggtttttgtttggggtaggaggagggttgggggagagttaaaagttaaagaaggtttatggaggttgttttttttttggtgattagttttttttttgatggtaagttgttaatagtatttggtttttaggttggggaaggtgagattagtttatatttgtttagggttttgttttgtttgtatgggtagtaggtgtttattttgttagatggttttgtttattatagggtattagtgttagttaaggatttatagagtttttttgtaaaggtttattagtgggtattgggattttgggttttatttatatagggtttttatataaaatataggatgtttagttaaatttggattttagataaataattaataattttttgaagagataaggattttgttgttttatttaagttggagtttagtggtatgattatggtttattgtaattttgaatttttggatttaagtaattttttaattgtagttttttaaagtattgggattgtaggtatgagttattaaggttagtaaataatgaattatttttaggtataagtatattttaagtttgttgtgggatatgtttatattaaaaattaatttttgtttatttgaaatttaaattgaatttattgttgggggagataatggagtgatggattgatagaggagtatagagatagtttttttaaatttttagttgattaaagtttggtttttagtttttttgggtttttagagatgtattaagggtggaagtgattaggagggagataaaaatattgaagtttgagtgttagtattgagttgtgtggttttggataggattgttttttttttgagttttagttttatatgttataattggttaataatagttataaagtatttgaagttaatggttgggagtttgttttaggaggtaggtattattaggatgtagagagagtgaggagtttttaaagttagtttaggttaggtatagtagtttatgtttgtaattttagtattttgagaggttgaggtgagagaattatttgagtttagaagtttaaggttgtagtgagttgtaattgtattgttgtattttaggttgaatgatagagtttttgtttttaaaataaaataaaataaaataaaataaaataataaagttagtttgtgtattggattgtatgttgttttaaagtatttaaagtgagagaggttaggaagtaatgagatgtagaaaggtagggggaggaggtttagaggtattagagaagatagttgatttttatttttatatatttttggggtattttgagttttatttatatatttaggtgagaatttttgtatttgtgaaagtaatttgaggttgagagaattaataggaaattgttttattttttatgtagggtttttttataaataaggttgagttgtagtttattattgtagttgagttttttgtagtagttgtggtggggaaggttttttaggaggtttgagtaatttagaaatatttatagtatattttttagtttttttagaggtttttgttgagatgaaagtgttttggtttgtggttaaagagtttagtatattgggtagttatagtttttattatattgatttggttattaggtttttatgaatttagtgaggggagatgggttttttagggaagtttgttgatttttttatattgttgtaaatgtaaagtttggtgattttattatttttagtaattgtgatgtagtaataataagaatagttatgtttattgtttattgaaggtatatgatgagttagatattgtgttggtatatgtgatttttggaggtaatatatttttttttaaggaggaaatgattgagttttggagggagggttttttatttggttttaggtttttttttgatttgtgtttttttttttttttttgtttgttttattgtagtttttttggtttttttgttgtttttggaatgtattaagtttgtttttagtttagtttttgtattgttggtttttttttgtttttttaattttaatttagttgttattatttttgtgattttttattatttattttaaagtagttattagttattttttatgtaattattttattttaatttttattatagtttttagttttattttgatagtttttagaattgatgaatttattgattttgtttttttttattgtatgtaaattttaagaaataagagtttttgtttgtttattgttgtgttttagtgtttgttatagtatttggtatgtagtaggtgtttaatgaatatatttttaaaagaatgaatgattggaaggagtttgaaagaatgatggtttgtgttaatagtttatttttaatttttttagatgggatggagattattattatgtaattatgatttttttgagtttgtgtggtggttgatggtaggtgttagtttggttggattaagggatggttggtaatgtattgtttttgggtgtgtttgtgagggtgtttttggaggagatgggtatgtgagttggtgggttgagtggtaaagatttttttttaatatggatgatattattttattgttagataataaaaaggtagagaaaaggtgaatttttttttttttttggaggtgggatgttttttttttttgtttttggatttagaatttttagttttttagtagttttttaggtttttaaatttttggttttaaattaagagttatattaatagttttttagttttgaggtttgtagatttggattgagttatgatattggtttttttgggtttttagtttgtggatggttttttgtggtatattttggtttttataatggtatgagttaatttttttaataaatttttttttatttatttattatttatttttttaattgtttatttgtttatttatttatttatttattatttattttttatttatttatttattatttatttaattaatgtatttatgtttgtttgtttattggttatttatatttatttattaattatttatttatttattatttatttgttatttatttagttatttatttatttatttatttattttttttttttttttgagatggagttttattttgttgtttaggttggagtgtagtggtgtgattttagtttattgtaatttttattttttaggtttaagtgatttttgtgttttagttttttgagtggttgggattatagatatgtattattatgtttagttaatttttttatttttagtagagatggggttttattttgttagttaggttggttttaaatttttggttttaagtgatttattggttttagtttattaatgtgttggttattataggtaagagttattgaatttaatttattatttgtttgtttgtttgtttgtttgtttgtgtttatttgtttgtttggttatttattatttatttatttatttgtttgtttgtttgtttgtttgtttgtgtttgtttgtttttatttttttgtttgtttgtttatttagttatttgtttgtttgtttgtttgtgtttgtttgtttttttttttttttgtttgtttgtttgtttatttagttatttatttatttatttattttttattggttgtttttttggagagttttggttgatgtagatggtgttttggtaagtttaggttgttatttagattattgtggagggagtgatttaaataatagatatgtattttttagtttgagaggtttaaagttttggattaaggtgttgttagggttagtttttggtgaggtttttttttttggtttgtatttatttttttgttgtgttttttgttattttttttttgtttataagtgaggggggaggagagatttttggtgtttttttttttttttataaggatattaattttattagattagggttttgttttatgattttatttaattttaattatttttttaaaagttttatttttaattatagttgtattgggagttagggttttaatgtaggaatttaaggggaagggtatagtttggtttataataaatgggaaattatgtttatgattaaattttttagaagatatggtttattagtgttgttaatgattgtaagtaaaggttagagaggaaaggggtttttgtggggtggggggtggtgggggtagttggtgttgggaataaggtttttttttttgtttaatagtagggaagtgaggttggttgtagatgttatttggggtgggaagagaggggagtttttgtttgtatattttgtgtgggttttggtttgatttttttttgtgttttttattttttgtgtttttttttgtgtgggagaaatgttgatttttgttggtttaggtgtttaggtttttaggtttgttggttttgggttgggtttaattaatgagaggtttgggaggaatttgggaggtggaagtaagggagggtgtgggagttttttattttttttgttttagatagtttttttagtaggagaggtggttttttgtgtagttttagtttttgttagagttttatttttgtttgggtttttagtaggtgattttggtttttggattttggttataggatttttttttttttatttttatttaggggtggtggtggtattttgttgttaatttttaggttatttttataatgttaagaattttttttttatttgtatggtttttttttaaggtattgagaagggttttaattatatgtttatagggttaaatattttttgtaaaatttataaaatggaaaatattttttttataattaattaatgtttttgtttatttttagttttgagtttttgtttgttatatttttttttgtgtgaggtggaaatggaggtttgttgttatgtgggggtttttgttaaggagaagttgaattggaaagatatttagtttggttttggttgggttatatttatgtagtttttatttatttttatgtatagtttagttattgtttgttattttggtgtggaaatggattttagtaatatttgttttatttattgttttaattttatttattgtgtagaattaaaaattataagatatgaatatattttgtggtgtttggtgttggaaaaatgtgtgtagtggagagaagtaagatttgaaatgtatgggtttagaagtaaatttgtggaaaattatttttattattagaggtgaagttgtaagtaaaggatttagtttttttaatgtggagttaaaatagaaaagtttttttggttagaaatatatgtataaatgttttatatgtagttagaaattttttttatttttttattttttttttgatgggaattatatttaaaaaaaaagaaaaaaataggatttattagaatttttgtgtattttgaataaaataattgtagtagtattattaattttatgttgattgttatttttgtatatattttaattattaaaaataaaaataaaatttgattaattaaggagatttatttgttttatttatttatttatttttgagatggagttttattttgttgtttaggttggagtgtaatggtatgattttggtttattgtaatttttgttttttgggtttaagttatttttttgttttagttttttaagtagttgggattataggtgtgtgttattatatttggttaattttttatgtttttggtagagatggggttttattatgttgattaggttggttttaaatttttgattttaagtgatttgtttattttaattttttatagtgttggaattataggtgtgagttattatgtttagtttatgtttttttttgttgttttttttttttttttgagatatggttttatttttttatttaggttggagtgtagtggtatgattatggtttattgtagttttgattttttgggtttaagtaatttttttattttagttttttaagtaattgggattataggtgtatgttattatgttttgttagtttttgtatttttagtagagatggggttttgttatgttgtttggattggttttgaatttttggttttaagtgatttatttgttttggttttttaaagtgttgggattataggtatgagttattgtgtttagtttgattagttttttgtttttgaaatagaaaatgatattataaagttattatattgaagaagtaatgttaaaaatgtgggagaaatagaattttggagatatgattgatagttgattggtatttttttgtatgtagtgatgtttgtgatatttaatagttgtttataatttataatttgttgttatttatttttttattttaaatgaattattgtatttatatttttagagggttgtataagtttatattattttgattttttgttgattgtttttttgttttttgtttggtttttattttttttattatttgtgtaattagttttttgtttttaagtttttttgttttaaatgtttaagtggattaggtattgtggtttttgtttgtaattttagtattttgggaggtttaggtaggaggattatataaatttaggagtataagattaatttgggtaatatagtaagattttgtttttatatatatataaaaaatataaaaattagtaaggtgtgatggtatatgtttgtagttttagtattttgggaggttgaggtaggaggattgtttgaggttgggagtttaggattagtttgggtaataaagtaagattttgtttttataaaaataaaagaaaaaattaggtaggtatatagtgtgtatttatagtttgagttatttgggaggttgagaagggaggattgtttgagtttaggagtttaaggttgttatgagttgtgattatattattgtattttagtttgtgtgatagagtgagattttgttttgggaaaaataaataaataaataaataaataaataaataaataaatgtttaagtggtttttattttttggttagattttattatatattttatgaataaattgtatgtatgagaaaggtgagtagatgaatagggtagggttagggggttaaggggaagattatagattatgtggagtgagattagtggttaaaaattgttaattatagttaggtttggtggtttatgaaggtaattttaatggttgggtttggtggtttatgtttgtaattttagtattttgggaggttgatgtgagtttattatttgaggttaagagtttgagattagtttggttaatgtagggaaattttgtttttattaaaaatattaaaattggttaggtatggtggtgggtgtttgtagttttagttatttgggaggttgaagtaggagaattggttgaatttgggaggtggaggttgtagtgagttgggattttattattgtattttagtttgggtgatagagtgagattttattttaaaaaatttaaaaaaaaaaaaataaaaaattgtagattttaataaggaagagttataggatgatattttaggatgtgggaaaaggttatgttagttttggattttttttgattaatgggtattttagttattaaaggggtagatgtgttttatttaatttttatttagttattagagtataatatagggatgtgttatagatagagatggagattaataggtagaggggtgatggggaggaagattgaggtaagaggaataaaatggggattgtagagggtaggtggtaggagtttgagggttttagaagaaattgttgtataagtaatgagttagtagggtgagtgatggttaggagaggtggtttaagaaaataaagagatatttttgggggtatagatgtgttttgaggggttgaggaagagatggggaaggggtggttttgtggatttttggtatgattgttgtggtgaaaaggaattaaagattttgataaggggatgattttttaaataaggaagttttgggtttttgtagggggattagtagattgagggtaaatggtattttgtttattaaagttttaataaaatgttaaggtaagaatatttgtttggttttgggggtaattttagaaatattagaaaagggatttattatgtgtaatttttttttaattatttggagaaatgtatggttatttaagatagagaaaggtagttaaagtaagtggaggttaggtatagtgatttatgtttgtatttttagtgttttgggaggttgaggtaggaggattgtttgaggttggaaatttagtattagtttaggtaataataaaataagattttgttgttataaaaataaaaataaaaattttttgagatggagttttattttttttgtttaggttggagtgttgtggtatgattttagtttattgtaatttttgttttttagatttaagtaatttttttgttttagttttttgagtagttgggattataggtatgtgttattatgtttagttaattttgtagttttagtagagatagggtttttttatgttggttaggttggttttgaatttttgatttttttggttttttaaagtgttaggattataggtatgagttattgtgtttggttgttataaaaattttttaaaaattagttaggtatgttaggtgtggtggtttttatttgtaattttagtattttgggaggttaaggtaggtggattatgaggttaggagtttgagattagtttgattaatatggtgaaattttgtttttattaaaaatataaaaattagttaggtgtggtggtatatgtttgtaattgtagttatttaggaggttgaggtaggagaattgttttaatttaggagttgggggttgtagtgagttgagattgtattatggtattttagtttgggtaatagagtaagattttgttttaaaaaaaaaaaaaaaaaaaaaattagttaggtatgtagtgtatatttgtagttttagttatttaggaggttgagaagggaggattaattgaaattgggaggttgagattgggaggttatgattatgttattgtattttaatttgggtaatatagtaagattttgtttaataataataataataaataatgtaagtgggtataagaatttatttatttatttatttatttatttatttatgagatagggttttattttgttgtttaggttggagtgtattggtgtaattttggtttattgtaagttttgttttttgggtttatgttatttttttgttttagttttttgagtagttgggattataggtgtttgttattgtatttagttaattttttgtatttttagtagagatggggttttattatggttttgattttttgattttgtgatttgtttgttttggttttttaaagtgttgggattataggtgtgagttattgtttttggttttaagaatttattttattttagtattttggaggttgaggtgagtggattatgaggttagaagattgagattattttggttaatatggtgaaattttgtttttattaaaaaaatataaaaaattagttgggtgtgggggtgggtgtttgtagttttagttatgtgggatgttgaggtaggagaatggtgtgaatttgggaggtggagtttgtagtgagtggagattgtgttattgtattttagtttgggtaatagagtgagattttattttaaaaaaaaaaaaaaaagaatttattttaagatagtaagttttagggttgaagttagtttttatttagttttaggtttaaagttataagtatggttattgtaatatttttatttaggatattattttttaggggtttagatttatattattaaggaggagtgtttatattagtagttggggagagggtggttttttataagatgtaatgtttattttgaagagttattatagtgataattatgaaatttatgtttgagatttaattttaagtgaaaagaatagaatttaatatttattttatggggagtataaaattttgaaaatatatgttttttataattaaattaaattttatgttatgtttttgaggagataagtattgaatggaatatagaagaaatgttatagttaatgattgttgaagttttttttttaattttttgtttatgttgtttggtaataagtaatatagaaaattgataataaaaagtaaaagagaaagaaaagatatagtgtatagtttagattgttttttttaaaaaattaaataataataataaaaagtataggttgggtgtggtggtttatgtttgtaattttagtattttgggaggttaaggtgggtggattatttgaggttgggagtttgagattagtttgattaatatggggatattttgtttgtattaaaaatataaaattagttgggtatggtgatgtaggtttgtaattttagttatttgggaggttgaggtaagagaattgtttgaatttgggaggtggaggttgtagtgagttgagattgtgtttttgtattttagtttgggtaataagagtgaaattttattttaaaaaaaaaaaaaaaaaagtataaatgtaagttgggtgtggtagtttatgtttgtaattttagtattttgggaggttggggtaggtggattatttgaggttaggagtttgaaattaatttggttaatatggtgaaattttatttttattaaaaatataaaaattagttaggtatggtggtgtgtgtttgtaattttagttatttaggaggttgaggtaggagaattgtttgaatttaggaggtagaggttgtagtgagttaagattgagttattatattttagtttgggtgatagagtgagattttgttttaaaaattaaattaaattaaattaaataaaataaaaaaaagaagtggtataatataaagttttggtagttaaagtgttaatttttagttattaggaaggttttgttatttaatgatttattgttttagttaaggttagttatattttgggtttttgatgttggaggtaatatgatgttaatattggtgagaaatttattatttttttttttttgttttttggtgttggtttttgtgtgtatttgtagtttttttattattggtgtttttatggtgtttatgttattggtttattttttagtaataatttgatagtttgatatttttgtagattttgtggttatagagttaaagttttttgttattagtgggttttgtagataattttttaaatttttttgggttgagttagttaagtttttaataagttggaagatgataggggttggatgtaatttatttttaattggtttgggttatatggatattattttttttttgggatttgatttgggatggaaataggagttatagtttatgggaaggttgtgaaaggaagttttggttttagggtgtggattaggttgatttgtggaataaggttttaggggtggtttatttgtttgttttgtttagttttttttggtaattatatttatttggggtttattttaaatttggtaggtaatgttgttgtttttattttagttgttgttttaatatgttttgtttggttaggataggtgtttaggtatggtatttagggatatttttggtttttggggtttaatttttggtttttaggtgtagtgttgggaaaagtagagggttttggttatggtgtaggttttgttataggttatttaagtagtttgggaggagttggaaagagagtaatgtatttatttggatagagattgaagttatatttttattgagaaaagatgatatttttgtttggattttttttttgaaattttaggttggggtggggtaggagttagtgagagagtttagtgttttaaaggggattttttggttttttgtgttttttaatttagtatttttggggatttatatatttagggtagagtggttatttagggttttttttatttagatataaaggttattgaaggttttgggttaatattgttttgaggatgattagtgatttgagtttttgttagagatagtaggtagtttgggtttaagggttgtttagtgatttgaagttgggattattttatattttttgtgttatttttgttttttgttttggaggtttttaggttgttaatagttatgttttggagaattaggttagattaggttgggaataaagtttagttgttatagagttgttgagaggttattggtaagtagtgtttaggagttgttttttttttgttagtaatagtttaatgtttttttttataggggttgtaaatgggtttatgtttagggtggggttagggagataaagtagagagaaattgggttgggagtagagagtgttatgttttattttggagatttaaggttaggttattttgtagagttggtgtttagagtttttagtgtataggagaggaggtaaatagaatttgatatttagtagtgtttggtagatgtttttggaatgaatgattaaatttatatggagagttgaaatgggttaggaattttagggagatgggtagtttatagtttagtagggttgttttagtagagtaggttaatgttaggttttttggtaaattttttggggtttaggtataattgttatattaggaaaggggtaggggtgattagtttattggttatgggggtattttattgtttttatagaagtttggtatttataggtttgggtgatatatgatttttatgtttggtattatgatggttgtttattaagtttttttatttattaggattgattttttttggttagtgattttagattattatgatttggtagttgttgttaggtttgtttggttaaggatttttttggagattgagttattttatatagtaaagtgagttatggggttatagtgttgtgtgttgtgtataagttttgagggttttatttagggattggtatttattgatttttataaatttttggtaattgtttagagttgggatgtttttaaggtaatagttttaataaatagaggtgtaggaatttagtgtgttattttttgttttattttaaaggtttatatttttaggggtttggagtttttttttggagttttttttattttaaagttagttggatttgtttaggaattgttattattattttttggttgggtttgtattgatgtgtattgaattttttttattaggtttattttaggtaaattttagagtttatgtaatattgtttgtggataaatattggggtggaaataggggttatttttaggttttagttatatggggttgttagggttgtttgggatggtaggagagtgttagaggagggtagtttaaggattaggtagggggtgggaagtgtttttttttatgggtttttaagtgagatgttttttgtaaatatttatttgggatttttaagtagagggttggtttttatgttatttggatttggattttagattattgtttttaagtggtaattttgggtttttttgtatttgttttggtttgagttggttatatttgtggggggtggttttaggaagaaggtggattgttgtaaatgtaatgttttgttgttaggtgtattgtttttggttattagaatttttttgggtaggttggggagatttgatgggtaagtgtttgtggtttggtgtgagtgggtagggtaggtggtttttgtttgggtatgtttttttatttttgtaatagattagggagagggttggttttaggatttaggtttagttagttgttttataattgaggggttttggtggaggatataagttagatagagttatagattaattgtatgaggtggttttttttttttagtttaggttttttgaatgtgttagagtagataagtttggatgtgaggaggtaagaggtagtgagaataggtgtggagatggggttgggggagaagaggaagaaattttgtgtttgtgttttttttatgtttgtttgttattgggttagttgattggggaagtgttttttgagggtgtaattttttgttttttttgtaagttagtttttggggtgttgggtgagggtgtagttttgtttattatggtgagttagtatattgaattatggtagaagttgttttttgtgtgggtgtagtttttttttttgtttaggatttagaagttatgatagtatagagttttttaattgtggttggtgtttttttaggaattttttgaaagttatagagaaattttagagtggttgggtatggtggtttatgtttgtgattttagtattttgggaggttgaggtgggtggattatttgaggtttggagtttgagattagtttggttagtatggtaaaattttatttttattaaaaaatataaaaattagttgggtatggtggtatatgtttgtaattttagttatttaggaggttgaggtatgagaattgtttgaatttgggaggtagaggttgtagtgaattgagattgtgttattgtattttagtttgggtaatagagtaagattttattttaaaaaaataaaaaataaaaaaagaatttttagagtaatttttaggtgttagtaggggtgtgatgtaattttagttttgtttttgtggtttattggttttgggtaagtttttttgttgttgttatttatagagagtttttaggggagtttgggaatgatggtaagttttatgtgatttagtatgtaaagggagttttaaaatttagaatttagagagttagggtgggtatagtgtagttggttttagtgttgaggggttgggggagagattttgtattatgttttgattatagtaagggaagattatggaggtttttggaatgttttagtaatggtgtaattttagttttttttatttttttgttaatgataattatgattatgatagtagttaataggttatagagtaggtattttttagtttttttaaatatgaatttgtttaatttttataataatatagtattgttttatttaataaatgaggtaggttgggtgtggtggtttatgtttgtaattatagtattttgggaggttaaggtaggtagattatgaggttaggagtttgagattagtttgattaatatggtgaaattttatttttagtaaaaatataaaaattagttgggtgtagtggtatgtttttataattttagttatttaggaggttgaggtaggagaattatttgaatttgggaggtggaggttgtagtaagttgagattatgttattgtattttagtttgggagatagagtgagattttgttttaaaaataaataaataaataaaattaaaaaatattatatatataaaaaaataaatgaggtaaatgagatgtatgaggtgagaattttgtgttatagggagaggtgtagtttggtgagatttaattttaaggggttggtggttttgagtttttaagtgtaattattggattatattgtttgtagattattattatttttattttattggaaggttgggtgaggtaattgggaaagtttggagtagtagtggagttgttagagagaatttgtttttagtgtttttttggattttgtagttgttttgtgtgggtttttgttgttttttgtattggaaaagatttttttatagatggggttttatgatgttatttaggttggagtgttgtgtttatttttaggtgttgttatagggttgtagttttgaatttttggttttaagtgatttttttgttttagttttttgagtagttttttgggtttaagtgatttttgtgttttagttttttgagtagttttttgggtttaagtgatttttgtgttttagttttttgagtagttgggattttaagtgtatttggttaagtttttttttattttttattatttaagatttttttttttttaaggtttagtttaattttatttttatttaaaatttttggggtatttttgtagtatttggaggttgaattgtttaggagggaagggtgttaatgagttggtgttttgtttttattttgatttttggtgagaatgtaagttttttgtaggtaaggattatattttattattatttttgtatttatttagatttggttatgtgtgtttagtatataaagtgtttttgatgattgtttatagatttatggtatttgagattgttttaatatatttttttaaaattttttttttttttagaggtttatgaatgtttaaattaggtttattgggaataatattatggttattttgtttattttgaagtttatatataggtttggaagtaataattttgtatagtttagatgaaaaaataaagatttttttgttgtttttggattgttagagttttgggggatttttaatattttttgttgttttttttaattttatggtgttgatggtttgttggggggttagtttgatttttgtgagtgtttgtatttggaaaagggttggtgttaagatagttttaggatatttagaatgagggtaagaggttatttttattattagttttttttagttttattttatataattgtaatatagtgatttagtatattttgggttattgttaagtagggagtaaattagaaatggtttgagttttttttttttttatttttagaggggtttgtttttttaggtaaatataaggaggtattgaggttgttgtataagagttggtttttgtttattttataaattttatttttatttattgtaaaaggttttgtttttttttttaaaaaaaaaaaaaaaaaagaaatttagtgaggggtggggtaggtgtgtgtggaggagaggagaaaaggataagtgatggtttttttattttttagtaagttgtaggtgtagagattttaagtttgttttagggtttttttggtatttgtgtaggagggtttttgtagaaaaaatttaggatttatgatttgggaggattttggttatttttattgtttggatttattagtgggaggtaaagtgtaagaaattaagggtaaagggttttttttgggtgggttagagattttttggaaagggttatgtattgtgtgatttttataataattttaagtatttggagtatgttggggaggaagttttggtgttaaaattaagtatgtgttatttggaagtttgtttttgtttattagtatattaatttatttatgtttttgatagagttgtgttttgggtgtgtagagggttattttgtttgtaataattgggtgaaagttgaaattttaagttattgatttagaagggtatttttggggaagttttgagtaattttttttgagataaggtattttattatttattttggtttttaaatatggaaagttagaggaaattgataatggtttaaaggtagggggatggttttgatgatttttttatttttaattaaggtttatgattttgtttttttattaataaaaattaatttatggatttttggtaggtatttttttatttgaatgaattaaaggagggatattaaataaatggtttttagatttagaagaggagatgttatttataatttgaggattgaggaggataaaggattttgtttgtttggattttttggagaaaattataaaggaaaaaaaaaaggaaggaaaagataaataatgaagatttggattttttttaatttgtttttgtggttttggtgtgtttatttgtgaaatggaattttagagtgttagagtgggagttttttatgaaatgaaagtttttgaattggtttatggtgaggtttaagttaggttttttttgtttatttaaggtgggttttgttagggtggagtgaggatgttagttgtgggtggtgttttgagtgtaaaatgtgaatttgagttgttaagtttgggtgttgttggatggttttatttggaggttgttttgtgttttattaagtagaggagaaattgaagagaatttgaagaaaggatgttgtggtttggattattagttttagaggttgaatttaaggatatttttttatttagttttgattttatttatttatatagatgtatagggatttaaagtatttggttgatttggaaagttagtgatttttgtgagggtgtaaggggtgaggaagagggagtgttttttagggtagtttttttgatatttgagtaagggttggagatagtgtaggggatggttggtttaggttgaaagtggtttgatagtggttttgttttgggaggaatttgatttgtagtgtgtttgttgtggggatttgtttagttttgggggtgttttgttatttttggttgtaggtatttaggtgagtagtgttggttttgggatattgatttttttttattttgggtgtgaagtttatttgagtaagatttttttatggtgtttttgtggttgttgtttttaggaaagtgtggtggtgaggtagtggggtgtgtgtttttagggtgttaattttgggttggtagtaggaaggtgggaagagggggtggtttgttgtttggagtgtattgattgggttttgttttggttttgtttttgttttgtttttttttggagatgtgtatagaattttggtttagttggttgtggttttgtttttgatttgttttttttttgttttgtgaatgtgtgtgttgagttttatttttgtttatttttgtgttgtgttgtatttggtggagtggggttggtgggtgttgggtttgggagggggtgtttttgtgtggtagtgtagattagattagattaggttaggttgggggtgggggttgtttgtgtggtttgttgtgtttgtagttttgtatttttagttttttgtgttggtgttaatggttggttttgggagttgttgtattttttagttttgagtttgggtggggtgggtttggttaggtggaagtgggtggaggtgtgggtgttttgggtggttttgttgggtgaggtggtggtgttgggtattgtggtggtgttgggtatagttgggggttggagttggggtgttggtttagtgggttggggtagggtgggataggatatttgttttgttatttttttggtaattaaaagggtagagtgtgttgattgagttggagttttagtttttttatttgtaaatgggtgtgttggatagatgattatttgttttttttgtgttgggtattgtgtgtagtttggtgtattggtgtagtggggtagatatagggagttgttttttataatttgggtaatgtaggtagtggtgagaggatgtaaaatttgtatggaagaattttttttatttggatatttttaaagtttttatgataaagtggtgtttttaatgtatagaggaagaagtgattaattatgattggagggtggtgttagagttttattgaggtgaaattaaaatagggttttaaggaatgagtaggaattagttaggtagttaaggtgatggaaggtagttgtttttgaaagagggaagggtgtggtggagtttgggaggtttgaggtattatagtgagtgtggagagatagaggtagggttgggtttttgtatagttgttaatggaggttgtagaggatgagaggaaggtgggaggttagttgggaagtgtttgttagttttgggtaggggtgtagtattgtttttttttgtagtttttttaaaaatgtataggaggttgaaagtgttattaatagttttgaaaaatttttttttttttttttttttttttattttttttgggggtttaagaagtatttttattttttgtttgagtgtgggaaatttatatgtatgagaatggaggtttatgtggtattgtgggtttgttttggtttatttgtttttttttttgagtaatttgtttagttatagttttgtagagggagtagtttagttagaggagtttttttttattttaggtagagttgattggattggagtggatattggattttaattgagtttatttttttttttatttgggggttagaggtttaggaggttttgggagggaagtgttgtaagggaggggagtagggagtatggatgaattgtgaatagtgttttggattttgggatgtttatattttaattgtaatttttatttatatgtttatttattgtttgtattagtattagtagattttggtttaggttgtgttttgatttggttagtaagtattatgatgatattgtttttagtttagttatgatgatattgttatgagtttaatgtttgggatttttaaagtttagtggtgttttaagaatttgggttatgggtgtattgttggttttgtttattttatttagtataagttagaggtgttttggagtatagttattttgaggatgttagttttggttgttttttggttttgggtaggtgggtttttttgtggatgtttatgtttttgtttggggttataatttataggaatttgggtatttaggatttaaggatatttgtgtggagtgatgttggatatattatatgggtgttttttgtgtgatggtttttggatatttgaattttttttttgattttaagaaattagaaagaaggataagagagagggagggaaggttgggaatgagggttttatatatttttgagatgtatgaagtttaatttgttatgaaattagagttaaaaaaaaaaaagaaaaattaaagagatgtatgaagtttaattgtttaagttttaaattttgtttttatttatttatttttattttttattttttgagagggagttttgtttttgttgttgaggttggagtgtaatggtgtgattttagtttattgtaatttttgttttttaggtttaagtgattttttagttttagttttttgagtagttgagattataggtgtttgttatatttggttaatttttttttttttgtaattttttttttttttagtagagatagggttttattatgttggttaggttggttttaaatttttaatttgaggtgatttttttgttttagttttttaaagtgttgggattataggtgtgagttattgtatttggtttatttatttatttatgagatagagtttttttttgttatttaggttagagtgtagtggtatgattttagtttattataatgtttattttttggatttaagtaatttttttgttttagttttttaagtagttgggattataggtatatgttattataattggttaatttttgtatttttagtagagatggggtttt

SEQ ID NO: 11 - DNA, 16 bp, Artificial Sequence
  chemically treated genomic DNA (Homo sapiens)
cgtcgcaacgcgtacg

SEQ ID NO: 12 - DNA, 20 bp, Artificial Sequence
  chemically treated genomic DNA (Homo sapiens)
cgcggtttcgattttaatgc

SEQ ID NO: 13 - DNA, 23 bp, Artificial Sequence
  chemically treated genomic DNA (Homo sapiens)
actccgacttaacccgacgatcg

SEQ ID NO: 14 - DNA, 23 bp, Artificial Sequence
  chemically treated genomic DNA (Homo sapiens)
acgaaattcctaacgcaaccgct

SEQ ID NO: 15 - DNA, 23 bp, Artificial Sequence
  chemically treated genomic DNA (Homo sapiens)
acgaaattcctaacgcaaccgct

SEQ ID NO: 16 - DNA, 108 bp, Artificial Sequence
  chemically treated genomic DNA (Homo sapiens)
cgtcgcaacgcgtacgactcaaaacttaataactccgacttaacccgacgatcgcgacgaaattcctaacgcaaccgcttaaaacttcgcattaaaatcgaaaccgcg

SEQ ID NO: 17 - DNA, 26 bp, Artificial Sequence
  chemically treated genomic DNA (Homo sapiens)
gtagtagttagtttagtatttatttt

SEQ ID NO: 18 - DNA, 42 bp, Artificial Sequence
  chemically treated genomic DNA (Homo sapiens)
cccaccaaccatcatatgttcgaaatgattttatttagttgc

SEQ ID NO: 19 - DNA, 17 bp, Artificial Sequence
  chemically treated genomic DNA (Homo sapiens)
cgttgatcgcggggttc

SEQ ID NO: 20 - DNA, 32 bp, Artificial Sequence
  chemically treated genomic DNA (Homo sapiens)
catcatatcaaaccccacaatcaacacacaac

1. A method for detecting and/or classifying colorectal cell proliferative disorders in a subject, comprising
obtaining a biological sample from a subject; and
determining the expression levels of at least one of Septin 9 and ALX4 in the biological sample, wherein at least one of underexpression and CpG methylation is indicative of the presence of pre-cancerous colorectal cell proliferative disorders.

2. The method according to claim 1, wherein a malignant or pre-malignant cell proliferative disorder is distinguished from a benign cell proliferative disorder, said method characterized in that at least one of underexpression and the presence of CpG methylation is indicative of the presence of a malignant or pre-malignant cell proliferative disorder and the absence thereof is indicative of the presence of a benign cell proliferative disorder.

3. The method according to any one of claims 1 to 2, wherein said expression level is determined by detecting the presence, absence or level of mRNA transcribed from said gene.

4. The method according to any one of claims 1 to 2, wherein said expression level is determined by detecting the presence, absence or level of a polypeptide encoded by said gene or sequence thereof.

5. The method according to claim 4, wherein said polypeptide is detected by one or more means selected from the group consisting of western blot analysis, chromatography, immunoassay, ELISA immunoassay, radioimmunoassay, antibody and combinations thereof.

6. The method according to any one of claims 1 to 2, wherein said expression is determined by detecting the presence or absence of CpG methylation within said gene, wherein the presence of methylation indicates the presence of a cell proliferative disorder.

7. A method for detecting and/or classifying cell proliferative disorders in a subject, comprising:
obtaining, from a subject, a biological sample containing subject genomic DNA;
contacting genomic DNA isolated from the biological sample with at least one reagent, or series of reagents that distinguishes between methylated and non-methylated CpG dinucleotides within at least one target region of the genomic DNA, wherein the target region comprises, or hybridizes under stringent conditions to a sequence of at least 16 contiguous nucleotides of at least one sequence selected from the group consisting of SEQ ID NO:1 to SEQ ID NO:2, wherein said contiguous nucleotides comprise at least one CpG dinucleotide sequence, and wherein detecting and/or classifying colorectal cell proliferative disorders is, at least in part, afforded.

8. The method of claim 7, comprising:
a) extracting or otherwise isolating genomic DNA from the biological sample obtained from the subject;
b) treating the genomic DNA of a), or a fragment thereof, with one or more reagents to convert cytosine bases that are unmethylated in the 5-position thereof to uracil or to another base that is detectably dissimilar to cytosine in terms of hybridization properties;
c) contacting the treated genomic DNA, or the treated fragment thereof, with an amplification enzyme and at least one primer comprising, a contiguous sequence of at least 9 nucleotides that is complementary to, or hybridizes under moderately stringent or stringent conditions to a sequence selected from the group consisting of SEQ ID NO:3 to SEQ ID NO:10, and complements thereof, wherein the treated genomic DNA or the fragment thereof is either amplified to produce at least one amplificate, or is not amplified; and
d) determining, based on a presence or absence of, or on a property of said amplificate, the methylation state or level of at least one CpG dinucleotide of a sequence selected from the group consisting SEQ ID NO:1 to SEQ ID NO:2, or an average, or a value reflecting an average methylation state or level of a plurality of CpG dinucleotides of a sequence selected from the groups consisting of SEQ ID NO:1 to SEQ ID NO:2, whereby at least one of detecting and classifying colorectal cellular proliferative disorders is, at least in part, afforded.

9. The method of claim 8, wherein treating the genomic DNA, or the fragment thereof in b), comprises use of a reagent selected from the group consisting of bisulfite, hydrogen sulfite, disulfite, and combinations thereof.

10. The method of claim 9, wherein contacting or amplifying in c) comprises use of at least one method selected from the group consisting of: use of a heat-resistant DNA polymerase as the amplification enzyme; use of a polymerase lacking 5′-3′ exonuclease activity; use of a polymerase chain reaction (PCR); and generation of an amplificate nucleic acid molecule carrying a detectable label.

11. The method of any one of claims 1, 2 and 7, wherein the biological sample obtained from the subject is selected from the group consisting of cell lines, histological slides, biopsies, paraffin-embedded tissue, body fluids, stool, colonic effluent, urine, blood plasma, blood serum, whole blood, isolated blood cells, cells isolated from the blood, and combinations thereof.

12. The method of claim 7, further comprising in step d) the use of at least one nucleic acid molecule or peptide nucleic acid molecule comprising in each case a contiguous sequence at least 9 nucleotides in length that is complementary to, or hybridizes under moderately stringent or stringent conditions to a sequence selected from the group consisting of SEQ ID NO:3 to SEQ ID NO:10, and complements thereof, wherein said nucleic acid molecule or peptide nucleic acid molecule suppresses amplification of the nucleic acid to which it is hybridized.

13. The method of claim 10, wherein determining in d) comprises hybridization of at least one nucleic acid molecule or peptide nucleic acid molecule in each case comprising a contiguous sequence at least 9 nucleotides in length that is complementary to, or hybridizes under moderately stringent or stringent conditions to a sequence selected from the group consisting of SEQ ID NO:3 to SEQ ID NO:10, and complements thereof.

14. The method of claim 13, wherein at least one such hybridizing nucleic acid molecule or peptide nucleic acid molecule is bound to a solid phase.

15. The method of claim 13, further comprising extending at least one such hybridized nucleic acid molecule by at least one nucleotide base.

16. The method of claim 10, wherein determining in d), comprises sequencing of the amplificate.

17. The method of claim 10, wherein contacting or amplifying in c), comprises use of methylation-specific primers.

18. A method for detecting and/or classifying colorectal cellular proliferative disorders, comprising:
a) extracting or otherwise isolating genomic DNA from a biological sample obtained from a subject;
b) digesting the genomic DNA of a), or a fragment thereof, with one or more methylation sensitive restriction enzymes, and contacting the DNA restriction enzyme digest, with an amplification enzyme and at least two primers suitable for the amplification of a sequence comprising at least one CpG dinucleotide of a sequence selected from the group consisting of SEQ ID NOS: 1 to 3; and
c) determining, based on a presence or absence of an amplificate, the methylation state or level of at least one CpG dinucleotide of a sequence selected from the group consisting of SEQ ID NOS:1 to SEQ ID NO:2, wherein at least one of detecting and classifying cellular proliferative disorders is, at least in part, afforded.

19. The method according to claim 18, wherein the presence or absence of an amplificate is determined by means of hybridization to at least one nucleic acid or peptide nucleic acid which is identical, complementary, or hybridizes under stringent or highly stringent conditions to an at least 16 base long segment of a sequence selected from SEQ ID NOS:1 to SEQ ID NO:2.

20. A treated nucleic acid derived from genomic SEQ ID NO:1 or SEQ ID NO:2, wherein the treatment is suitable to convert at least one unmethylated cytosine base of the genomic DNA sequence to uracil or another base that is detectably dissimilar to cytosine in terms of hybridization.

21. A nucleic acid, comprising at least 16 contiguous nucleotides of a treated genomic DNA sequence selected from the group consisting of SEQ ID NO:3 to SEQ ID NO:10, and sequences complementary thereto, wherein the treatment is suitable to convert at least one unmethylated cytosine base of the genomic DNA sequence to uracil or another base that is detectably dissimilar to cytosine in terms of hybridization.

22. A nucleic acid, comprising at least 50 contiguous nucleotides of a DNA sequence selected from the group consisting of SEQ ID NO:3 to SEQ ID NO:10, and sequences complementary thereto.

23. The nucleic acid of any one of claims 21 to 22, wherein the contiguous base sequence comprises at least one CpG, TpG or CpA dinucleotide sequence.

24. (canceled)

25. A kit suitable for performing the method according to claim 3, comprising:
a) a plurality of oligonucleotides or polynucleotides suitable to hybridize under stringent or moderately stringent conditions to the transcription products of at least one of the genes Septin 9 and ALX4;
(b) a container suitable for containing the oligonucleotides or polynucleotides and a biological sample of the patient comprising the transcription products wherein the oligonucleotides or polynucleotides are suitable to hybridize under stringent or moderately stringent conditions to the transcription products;
(c) means to detect the hybridization of (b); and optionally
(d) instructions for use and interpretation of the kit results.\

26. A kit suitable for performing the method according to claim 4, comprising:
(a) a means for detecting Septin 9 and/or ALX4 polypeptides;
(b) a container suitable for containing the said means and a biological sample of a patient comprising the polypeptides, wherein the means can form complexes with the polypeptides; and
(c) a means to detect the complexes of (b).

27. A kit suitable for performing the method according to claim 7, comprising:
(a) a bisulfite reagent;
(b) a container suitable for containing the said bisulfite reagent and a biological sample of a patient;
(c) at least one set of oligonucleotides containing two oligonucleotides whose sequences in each case are identical, are complementary, or hybridize under stringent or highly stringent conditions to a 9 or more, preferably 18 base long segment of a sequence selected from the group consisting of SEQ ID NOS:3 to SEQ ID NO:10.

28. A kit suitable for performing the method according to claim 18, comprising:
(a) a methylation sensitive restriction enzyme reagent;
(b) a container suitable for containing the said reagent and a biological sample of a patient;
(c) at least one set of oligonucleotides, one or a plurality of nucleic acids or peptide nucleic acids which are identical, are complementary, or hybridize under stringent or highly stringent conditions to an at least 9 base long segment of a sequence selected from SEQ ID NOS: 1 or SEQ ID NO: 2; and optionally
(d) instructions for use and interpretation of the kit results.

29. (canceled)
